(19) United States
(12) Patent Application Publication
(10) Pub. No.: US 2022/0282241 A1
(43) Pub. Date: Sep. 8, 2022

(54) SYNTHETIC GENOME

(71) Applicants: United Kingdom Research and Innovation, Swindon (GB); Scarab Genomics, LLC, Madison, WI (US)

(72) Inventors: Julius FREDENS, Swindon (GB); Kaihang WANG, Swindon (GB); Daniel DE LA TORRE, Swindon (GB); Louise F. H. FUNKE, Swindon (GB); Wesley E. ROBERTSON, Swindon (GB); Jason W. CHIN, Swindon (GB)

(21) Appl. No.: 17/610,974

(22) PCT Filed: May 14, 2020
(86) PCT No.: PCT/EP2020/063445

§ 371 Date: Nov. 12, 2021

(30) Foreign Application Priority Data
May 14, 2019 (GB) 1906775.0

(51) Int. Cl. C12N 15/10; C12N 1/20; C12N 15/90

(52) U.S. Cl. CPC C12N 15/1031; C12N 1/205; C12N 15/902

(57) ABSTRACT

The current invention provides a synthetic prokaryotic genome comprising 5 or fewer occurrences of one or more sense codons; and/or a synthetic prokaryotic genome derived from a parent genome, wherein the synthetic prokaryotic genome comprises less than 10%, 5%, 2%, 1%, 0.5%, 0.1% of the occurrences of one or more sense codons, relative to the parent genome; and/or a synthetic prokaryotic genome comprising 100 or more, 200 or more, or 1000 or more genes with no occurrences of one or more sense codons.

### FIELD OF THE INVENTION

[0001] The present invention relates to synthetic genomes and methods of their production.

### BACKGROUND TO THE INVENTION

[0002] The design and synthesis of genomes provides a powerful approach for understanding and engineering biology. Genome synthesis has the potential to accelerate metabolic engineering. In particular, genome synthesis has the potential to elucidate synonymous codon function and to facilitate genetically encoded unnatural polymer synthesis (Wang, K., et al., 2016. Nature, 539(7627), 59-64).

[0003] The standard genetic code encodes the 20 canonical amino acids using 61 sense codons, and eighteen of the twenty amino acids are encoded by more than one synonymous codon. Nature chooses one sense codon, from up to six synonyms, to encode each amino acid at each position in a gene. Synonymous codon choice can influence mRNA folding, transcriptional and translational regulatory sequences, translation rate, co-translational folding, protein levels, and has emerging and yet to be understood roles (Wang, K., et al., 2016. Nature, 539(7627), 59-64; and Cambray, G., et al., 2018. Nature biotechnology, 36(10), 1005-1015).

[0004] Genome-wide replacement of a target codon with synonymous codons (synonymous codon compression) may provide a foundation for reassigning sense codons to non-canonical amino acids (or other monomers) to facilitate the in vivo biosynthesis of genetically encoded non-canonical biopolymers (Chin, J. W., 2017. Nature, 550(7674), 53-60).

[0005] Site-directed mutagenesis approaches have been used to replace up to 321 amber stop codons in the E. coli genome (Mukai, T., et al., 2015. Scientific reports, 5, p.9699). However, sense codons are commonly orders of magnitude more abundant than stop codons, and genome synthesis, rather than mutagenesis, may be the preferred route to tackling sense codon removal in many cases.

[0006] Genome synthesis has enabled the creation of Mycoplasma with synthetic genomes (Gibson, D. G., et al., 2010. Science, 329(5987), 52-56) and the creation of nine strains of S. cerevisiae in which the DNA for one or two of the sixteen chromosomes is replaced by synthetic DNA (Zhang, W., et al., 2017. Science, 355(6329), eaaf3981; and Richardson, S. M., et al., 2017. Science, 355(6329), 1040-1044). These experiments have replaced up to 1 Mb of DNA (0.99 Mb, yeast; 1.08 Mb, Mycoplasma) in individual strains. Replicon excision for enhanced genome engineering through programmed recombination (REXER) has been reported for replacing >100 kb of the E. coli genome with synthetic DNA in a single step. Moreover, it has been shown that REXER can be iterated via genome stepwise interchange synthesis (GENESIS) to replace 220 kb of the E. coli genome with 230 kb of synthetic DNA (Wang, K., et al., 2016. Nature, 539(7627), 59-64; WO 2018/020248).

[0007] Genome synthesis has been used to alter synonymous codons in individual genes (Napolitano, M. G., et al., 2016. PNAS, 113(38), E5588-E5597), genomic regions and essential operons (Wang, K., et al., 2016. Nature, 539(7627), 59-64; and Lau, Y. H., et al. 2017. Nucleic acids research, 45(11), 6971-6980). For instance, Wang et al. used defined ‘recoding schemes’ to replace a 20 kb region of the E. coli genome rich in both essential genes and target codons.

[0008] However, these studies have mutated only a small fraction (up to 4.7%) of targeted sense codons in the genome of a single strain. Consequently, it is not known whether the application of these methods to genome-wide synonymous codon compression will be able to produce viable genomes. For instance, it is not known whether the defined recoding schemes tested in Wang et al. can be applied genome-wide to create an organism in which a reduced number of sense codons are used to encode the 20 canonical amino acids.

[0009] Thus, there is a demand for synthetic genomes, wherein one or more sense codon has been removed. There is also a demand for improved methods to produce synthetic genomes.

### SUMMARY OF THE INVENTION

[0010] The inventors have surprisingly found that a viable synthetic prokaryotic genome may be produced, wherein one or more sense codon has been removed. In particular, they produced a viable synthetic genome in which the number of codons used to encode cellular protein is reduced from 64 to 61, by genome-wide recoding of two sense codons and one stop codon. They also produced an E. coli host cell comprising said synthetic genome.

[0011] They inventors have also surprisingly found that defined recoding and refactoring schemes can enable genome-wide synonymous codon compression for more than 99.9% of target codons. They found that alternative recoding and refactoring at non-tolerated positions enabled genome-wide synonymous codon compression.

[0012] The inventors have also surprisingly found that recombination-mediated genetic engineering (e.g. REXER and/or GENESIS) may be combined with directed conjugation to efficiently produce synthetic genomes. In particular, they found, for example, that at least about 4 Mb of DNA can be efficiently replaced by said method and that said method allows failures in the design of synthetic DNA (non-tolerated positions) to be identified at codon-level resolution.

[0013] Accordingly, in one aspect the present invention provides a synthetic prokaryotic genome comprising 5 or fewer occurrences of one or more sense codons. In some embodiments the synthetic prokaryotic genome comprises 4 or fewer, 3 or fewer, 2 or fewer, 1 or fewer, or no occurrences of one or more sense codons. In some embodiments the one or more sense codons consist of one sense codon or two sense codons, preferably two sense codons. In some embodiments the synthetic prokaryotic genome comprises no occurrences of two or more sense codons, preferably two sense codons, and no occurrences of one stop codon, preferably the amber stop codon (TAG).

[0014] The synthetic prokaryotic genome may be a synthetic bacterial genome, preferably a synthetic Escherichia coli, Salmonella enterica, or Shigella dysenteriae genome. In some embodiments the synthetic prokaryotic genome is 100 kb to 10 Mb, or 1 Mb to 10 Mb, or 2 Mb to 6 Mb in size. The synthetic prokaryotic genome may be viable. In some embodiments the synthetic prokaryotic genome comprises 100 or more, 200 or more, or 1000 or more genes, optionally wherein the genes have no occurrences of the one or more sense codons, preferably wherein the genes are essential genes.

[0015] In some embodiments the one or more sense codons are selected from TCG, TCA, TCT, TCC, AGT, AGC, GCG, GCA, GCT, GCC, CTG, CTA, CTT, CTC, TTG, and TTA, preferably the one or more sense codons are selected from TCG, TCA, AGT, AGC, GCG, GCA, CTG, CTA, TTG, and TTA, more preferably the one or more sense codons are selected from TCG, TCA, AGT, AGC, TTG, TTA, GCG and GCA, most preferably the one or more sense codons are TCG and/or TCA.

[0016] In some embodiments the synthetic prokaryotic genome comprises 10 or fewer, 5 or fewer, or no occurrences of the amber stop codon (TAG).

[0017] In a further aspect the present invention provides a synthetic prokaryotic genome comprising 100 or more, 200 or more, or 1000 or more genes, wherein the genes collectively comprise 5 or fewer occurrences of one or more sense codons, preferably wherein the genes are essential genes. In some embodiments the genes collectively comprise 4 or fewer, 3 or fewer, 2 or fewer, 1 or fewer, or no occurrences of one or more sense codons. In some embodiments the one or more sense codons consist of one sense codon or two sense codons, preferably two sense codons.

[0018] The synthetic prokaryotic genome may be a synthetic bacterial genome, preferably a synthetic Escherichia coli, Salmonella enterica, or Shigella dysenteriae genome. In some embodiments the synthetic prokaryotic genome is 100 kb to 10 Mb, or 1 Mb to 10 Mb, or 2 Mb to 6 Mb in size. The synthetic prokaryotic genome may be viable.

[0019] In some embodiments the one or more sense codons are selected from TCG, TCA, TCT, TCC, AGT, AGC, GCG, GCA, GCT, GCC, CTG, CTA, CTT, CTC, TTG, and TTA, preferably the one or more sense codons are selected from TCG, TCA, AGT, AGC, GCG, GCA, CTG, CTA, TTG, and TTA, more preferably the one or more sense codons are selected from TCG, TCA, AGT, AGC, TTG, TTA, GCG and GCA, most preferably the one or more sense codons are TCG and/or TCA.

[0020] In some embodiments the synthetic prokaryotic genome comprises 10 or fewer, 5 or fewer, or no occurrences of the amber stop codon (TAG).

[0021] In a further aspect the present invention provides a synthetic prokaryotic genome derived from a parent prokaryotic genome, wherein the synthetic prokaryotic genome comprises less than 10%, 5%, 2%, 1%, 0.5%, 0.1% of the occurrences of one or more sense codons, relative to the parent prokaryotic genome, or wherein the synthetic prokaryotic genome comprises no occurrences of one or more sense codons. In some embodiments the one or more sense codons consist of one sense codon or two sense codons, preferably two sense codons.

[0022] The synthetic prokaryotic genome may be a bacterial genome, preferably an Escherichia coli, Salmonella enterica, or Shigella dysenteriae genome. In some embodiments the synthetic prokaryotic genome is 100 kb to 10 Mb, or 1 Mb to 10 Mb, or 2 Mb to 6 Mb in size. The synthetic prokaryotic genome may be viable.

[0023] In some embodiments the one or more sense codons are selected from TCG, TCA, TCT, TCC, AGT, AGC, GCG, GCA, GCT, GCC, CTG, CTA, CTT, CTC, TTG, and TTA, preferably the one or more sense codons are selected from TCG, TCA, AGT, AGC, GCG, GCA, CTG, CTA, TTG, and TTA, more preferably the one or more sense codons are selected from TCG, TCA, AGT, AGC, TTG, TTA, GCG and GCA, most preferably the one or more sense codons are TCG and/or TCA, optionally wherein TCG and/or TCA are replaced with synonymous sense codons.

[0024] Preferably 90% or more, 95% or more, 98% or more, 99% or more, 99.5% or more, 99.6% or more, 99.7% or more, 99.8% or more, 99.9% or more, or 100% of the occurrences of the one or more sense codons in the parent prokaryotic genome are replaced with synonymous sense codons. In some embodiments 90% or more, 95% or more, 98% or more, 99% or more, 99.5% or more, 99.6% or more, 99.7% or more, 99.8% or more, 99.9% or more, or 100% of the occurrences of TCG and/or TCA in the parent prokaryotic genome are replaced with AGC and/or AGT, most preferably 90% or more, 95% or more, 98% or more, 99% or more, 99.5% or more, 99.6% or more, 99.7% or more, 99.8% or more, 99.9% or more, or 100% of the occurrences of TCG in the parent prokaryotic genome are replaced with AGC and/or 90%, 95%, 90% or more, 95% or more, 98% or more, 99% or more, 99.5% or more, 99.6% or more, 99.7% or more, 99.8% or more, 99.9% or more, or 100% of the occurrences of TCA in the parent prokaryotic genome are replaced with AGT.

[0025] In some embodiments the synthetic prokaryotic genome comprises 10 or fewer, 5 or fewer, or no occurrences of the amber stop codon (TAG), preferably wherein 90% or more, 95% or more, 98% or more, 99% or more, or all of the occurrences of TAG in the parent prokaryotic genome are replaced with TAA.

[0026] In some embodiments 99.9% or more, or 100% of the occurrences of two or more sense codons, preferably two sense codons, in the parent prokaryotic genome are replaced with synonymous sense codons, and all of the occurrences of TAG in the parent prokaryotic genome are replaced with TAA.

[0027] One or more pairs of genes which share an overlapping region comprising the one or more sense codons in the parent prokaryotic genome may be refactored, preferably wherein the one or more pairs of genes are those in which replacement of one or more of the sense codons with synonymous sense codons would change the encoded protein sequence of both or either of the pair of genes.

[0028] In some embodiments for pairs of genes in opposite orientations, a synthetic insert is inserted between the genes, wherein the synthetic insert comprises the overlapping region; and/or for pairs of genes in the same orientation, a synthetic insert is inserted between the genes, wherein the synthetic insert comprises: (i) a stop codon; (ii) about 20-200 bp from upstream of the overlapping region; and (iii) the overlapping region.

[0029] In a further aspect the present invention provides a polynucleotide comprising twenty or more, thirty or more, forty or more, fifty or more, 100 or more essential genes with no occurrences of one or more sense codons. In some embodiments the one or more sense codons consist of one sense codon or two sense codons, preferably two sense codons.

[0030] In some embodiments the one or more sense codons are selected from TCG, TCA, TCT, TCC, AGT, AGC, GCG, GCA, GCT, GCC, CTG, CTA, CTT, CTC, TTG, and TTA, preferably the one or more sense codons are selected from TCG, TCA, AGT, AGC, GCG, GCA, CTG, CTA, TTG, and TTA, more preferably the one or more sense codons are selected from TCG, TCA, AGT, AGC, TTG, TTA, GCG and GCA, most preferably the one or more sense codons are TCG and/or TCA.

[0031] The occurrences of the one or more sense codons in the genes may be replaced with synonymous sense codons, preferably TCG codons are replaced with AGC and/or TCA codons are replaced with AGT.

[0032] The essential genes may comprise essential genes selected from one or more of the list consisting of: ribF, IspA, ispH, dapB, folA, imp, yabQ, ftsL, ftsl, murE, murF, mraY, murD, ftsW, murG, murC, ftsQ, ftsA, ftsZ, IpxC, secM, secA, can, folk, hemL, yadR, dapD, map, rpsB, tsf, pyrH, frr, dxr, ispU, cdsA, yaeL, yaeT, IpxD, fabZ, IpxA, IpxB, dnaE, accA, tilS, proS, yafF, hemB, secD, secF, ribD, ribE, thiL, dxs, ispA, dnaX, adk, hemH, IpxH, cysS, folD, entD, mrdB, mrdA, nadD, holA, ripB, leuS, Int, gInS, fldA, cydA, infA, cydC, ftsK, lolA, serS, rpsA, msbA, IpxK, kdsB, mukF, mukE, mukB, asnS, fabA, mviN, me, fabD, fabG, acpP, tmk, holB, loIC, IoID, IoIE, purB, minE, minD, pth, prsA, ispE, IoIB, hemA, prfA, prmC, kdsA, topA, ribA, fabl, tyrS, ribC, ydiL, pheT, pheS, rplT, infC, thrS, nadE, gapA, yeaZ, aspS, argS, pgsA, yefM, metG, folE, yejM, gyrA, nrdA, nrdB, folC, accD, fabB, gltX, ligA, zipA, dapE, dapA, der, hisS, ispG, suhB, tadA, acpS, era, mc, lepB, rpoE, pssA, yfiO, rpIS, trmD, rpsP, ffh, grpE, csrA, ispF, ispD, ftsB, eno, pyrG, chpR, lgt, fbaA, pgk, yqgD, metK, yqgF, plsC, ygiT, parE, ribB, cca, ygjD, tdcF, yraL, yhbV, infB, nusA, ftsH, obgE, rpmA, rplU, ispB, murA, yrbB, yrbK, yhbN, rpsl, rpIM, degS, mreD, mreC, mreB, accB, accC, yrdC, def, fmt, rpIQ, rpoA, rpsD, rpsK, rpsM, secY, rpIO, rpmD, rpsE, rpIR, rpIF, rpsH, rpsN, rplE, rpIX, rpIN, rpsQ, rpmC, rpIP, rpsC, rpIV, rpsS, rpIB, rpIW, rpID, rpIC, rpsJ, fusA, rpsG, rpsL, trpS, yrfF, asd, rpoH, ftsX, ftsE, ftsY, yhhQ, bcsB, glyQ, gpsA, rfaK, kdtA, coaD, rpmB, dfp, dut, gmk, spoT, gyrB, dnaN, dnaA, rpmH, rnpA, yidC, tnaB, glmS, glmU, wzyE, hemD, hemC, yigP, ubiB, ubiD, hemG, yihA, ftsN, murl, murB, birA, secE, nusG, rpIJ, rpIL, rpoB, rpoC, ubiA, plsB, lexA, dnaB, ssb, alsK, groS, psd, orn, yjeE, rpsR, chpS, ppa, valS, yjgP, yjgQ, and dnaC.

[0033] In a further aspect the present invention provides a prokaryotic host cell comprising a synthetic prokaryotic genome according to the present invention or a polynucleotide according to the present invention.

[0034] The prokaryotic host cell may be viable. The prokaryotic host cell may be a bacterial cell, preferably an Escherichia coli, Salmonella enterica, or Shigella dysenteriae cell. Preferably the host cell is suitable for use in production of polypeptides comprising one or more non-proteinogenic amino acids, preferably two or more non-proteinogenic amino acids, most preferably three or more non-proteinogenic amino acids.

[0035] In a further aspect the present invention provides use of a prokaryotic host cell according to the present invention for producing polypeptides comprising one or more non-proteinogenic amino acids, preferably two or more non-proteinogenic amino acids, most preferably three or more non-proteinogenic amino acids.

[0036] In a further aspect the present invention provides a method for producing a synthetic genome comprising:
[0037] (a) providing a parent genome;
[0038] (b) carrying out one or more rounds of recombination-mediated genetic engineering on the parent genome, to produce two or more different partially synthetic genomes; and
[0039] (c) carrying out one or more rounds of directed conjugation with the two or more different partially synthetic genomes to produce a synthetic genome;

[0040] wherein the partially synthetic genomes each comprise a synthetic region that has 50 or fewer, 20 or fewer, 10 or fewer, 5 or fewer, or 0 occurrences of each of one or more sense codons; or wherein the partially synthetic genomes each comprise a synthetic region that has less than 10%, 5%, 2%, 1%, 0.5%, 0.1% of the occurrences of each of one or more sense codons, relative to the corresponding region in the parent genome.

[0041] The synthetic regions may collectively cover 90% or greater, 95% or greater, 99% or greater or 100% of the parent genome. In some embodiments the synthetic regions are 10-1000 kb, 50-1000 kb, 100-1000 kb, or 100-500 kb in size.

[0042] The method may further comprise testing the viability of the partially synthetic genomes after each round of recombination-mediated genetic engineering and/or after each round of directed conjugation.

[0043] The two or more different partially synthetic genomes may comprise at least one partially synthetic donor genome and at least one partially synthetic recipient genome. In some embodiments the at least one partially synthetic donor genome comprises a synthetic region and a first selectable marker flanked by two homology regions immediately downstream of an origin of transfer; and the at least one partially synthetic recipient genomes comprise a second selectable marker flanked by two corresponding homology regions, optionally wherein the first selectable marker comprises a positive selectable marker, and/or the second selectable marker comprises a negative selectable marker. In some embodiments the synthetic region present in the at least one partially synthetic recipient genomes is outside the region flanked by the homology regions. In some embodiments the method further comprises one or more rounds of selection for the selectable markers.

[0044] The one or more rounds of recombination-mediated genetic engineering may comprise one or more rounds of replicon excision for enhanced genome engineering through programmed recombination (REXER).

[0045] The synthetic genome may be a synthetic prokaryotic genome according to the present invention.

[0046] In a further aspect the present invention provides a synthetic prokaryotic genome produced by the method of the present invention.

### DESCRIPTION OF DRAWINGS

[0047] FIG. 1—Design of the synthetic genome implementing a defined recoding scheme for synonymous codon compression.

[0048] a, The defined recoding scheme for synonymous codon compression. Synonymous serine codons and three stop codons used in the genome of WT E. coli are shown. Systematically implementing a defined recoding scheme for synonymous codon compression recodes target codons to defined synonyms, and replaces the amber stop codon TAG with the ochre stop codon TAA. This creates an organism with a recoded genome that uses a reduced number of serine and termination codons.

[0049] b, Refactoring of 3′, 3′ overlaps enables their independent recoding. The overlap between two open reading frames (ORF-1 and ORF-2) is duplicated, creating a synthetic insert. This enables independent recoding of ORFs.

[0050] c, Refactoring 5′, 3′ overlaps. The overlap plus 20 bp upstream is duplicated to generate a synthetic insert. When the overlap is longer than 1 bp at the end of the upstream ORF, an in-frame TAA is introduced in the beginning of the synthetic insert; this in-frame stop codon ensures termination of translation from the original RBS. Thus, all full-length translation of the downstream ORF is initiated from the reconstructed RBS in the synthetic insert.

[0051] d, Map of the synthetic genome design with all TCG, TCA and TAG codons removed. Outer ring: 18,218 positions of all TCG→AGC, TCA→AGT and TAG→TAA recoding. Grey ring: 12 positions of designed silent mutations in overlaps, 21 refactoring of 3′, 3′ overlaps (b) and 58 refactoring of 5′ 5′ overlaps (c). The two inner rings illustrate the genome sections. Outer ring: the eight genome sections (A-H) of the synthetic genome design. Inner ring: 37 fragments of approximately 100 kb each. Fragment 37 is shown as 37a and 37b to reflect the final assembly. oriC: Origin of replication.

[0052] FIG. 2—Retrosynthesis of the synthetic genome.

[0053] a, Disconnecting the genome into eight sections. The synthetic genome was disconnected into sections A-H, with each section corresponding to approximately 0.5 Mb (step 1). The position of the replication origin oriC (orange square) is indicated. Sections were assembled into a completely recoded genome (in the forward sense, opposite direction of retrosynthesis arrow) by directed conjugation (FIG. 10 and FIG. 11).

[0054] b, Disconnecting genome sections into 100 kb fragments. Sections are further disconnected into four to five fragments of around 100 kb each. Section A is depicted, and other sections were treated similarly. Nearly all sections were constructed entirely through consecutive REXER steps (FIG. 3), by GENESIS (FIG. 4). Each step replaced around 100 kb of wild-type genomic sequence with 100 kb of synthetic fragment (step 2 and 3). Double selection markers composed of negative selection marker—1 (rpsL), and positive selection marker +1 (Kan^{R}), and a negative selection marker—2 (SacB), and positive selection marker +2 (Cm^{R}), were used in alternating rounds of REXER to realize GENESIS.

[0055] c, Disconnecting each 100 kb synthetic fragment into 10 kb synthetic stretches. Each 100 kb synthetic fragment is further disconnected into 9 to 14 short synthetic stretches of around 10 kb in length (step 4). The BACs carrying 100 kb synthetic fragments were assembled by homologous recombination in yeast. Each BAC contains Cas9 cleavage sites (black triangles) enabling excision of the synthetic DNA in vivo, homology regions (HR1 and HR2) for targeting recombination, the appropriate double selection cassette (+2,−2 indicated) for selecting during REXER and GENESIS, a negative selection marker (-1 indicated) to enable loss of the backbone following REXER, a BAC YAC origin and URA3 marker for maintenance in E. coli and S. cerevisiae.

[0056] FIG. 3—Using 100 kb fragments of synthetic DNA to replace the corresponding regions in the genome through REXER.

[0057] REXER (replicon excision for enhanced genome engineering through programmed recombination) utilizes CRISPR/Cas9 and lambda-red mediated recombination to replace genomic DNA with synthetic DNA provided from an episome (BAC). This enables large regions of the genome (>100 kb) to be replaced by synthetic DNA (VVang, K., et al., 2016. Nature, 539(7627), 59-64; WO 2018/020248). The black triangles denote the location of CRISPR protospacers, which are cleaved by Cas9 to liberate the synthetic DNA (pink) cassette from the BAC flanked by homology regions (HRs). Homology regions 1 and 2 (HR1, HR2) program the location of recombination into the E. coli genome. Selection cassette—1/+1 ensures the integration of the synthetic DNA, while selection cassette −2/+2 on the genome ensures the removal of the corresponding wt DNA. In the example shown in the figure, +1 is Kan^{R}, −1 is rpsL, +2 is Cm^{R}, −2 is sacB.

[0058] FIG. 4—GENESIS enables the stepwise replacement of genomic DNA by synthetic DNA to generate recoded sections.

[0059] Iterative cycles of REXER (see FIG. 3), with alternating choices of positive and negative selection cassettes, enables genome stepwise interchange synthesis (GENESIS) (Wang, K., et al., 2016. Nature, 539(7627), 59-64). This enables large sections of the synthetic genome to be assembled through the iterative addition of fragments that replace the corresponding genomic sequence, in a clockwise manner. The first REXER of a 100 kb synthetic fragment of DNA leaves a −1/+1 selection cassette on the genome which acts as a landing site for the downstream integration of a second fragment of synthetic DNA harbouring a −2/+2 selection cassette. In the example shown, +1 is Kan^{R}, −1 is rpsL, +2 is Cm^{R}, −2 is sacB, but the same logic can be used with different permutations of markers on the genome and the BAC.

[0060] FIG. 5—Recoding ftsl-murE and map in fragment 1.

[0061] a, Recoding landscape of fragment 1. We sequenced six clones post-REXER. Each dot represents the frequency of recoding within the sequenced clones (y axis) for a target codon at the indicated position in the genome (x axis). Black dots indicate positions where we did not observe recoding. Four codons and a refactoring of ftsl-murE and one codon in map were rejected.

[0062] b, Refactoring the 14 bp ftsl-murE overlap. The codons and overlaps are grey scaled by their post-REXER replacement frequency in the clones sequenced. Using our initial refactoring scheme (1), in which the overlap plus 20 bp of upstream sequence was duplicated; we did not observe replacement of the overlap by synthetic DNA (in the six clones sequenced post-REXER). Refactoring scheme 2, which duplicates the overlap plus 182 bp of upstream sequence, resulted in complete recoding of this region in 12 of 16 post-REXER clones sequenced.

[0063] c, Testing alternative codons at Ser4 in map. A double-selection marker, pheS*-Hyg^{R} on a constitutive EM7 promoter, was introduced upstream of map followed by a RBS. We replaced the cassette using linear double stranded DNA that introduces alternative codons at position four (as indicated), via lambda red recombination and negative selection for loss of pheS*. DNA with AGC and AGT did not integrate (0/16 clones); we recovered one clone for AGC, but sequencing revealed it contained a mutant AAC (Asn) codon. TCT (6/8), TCC (6/16), ACA (6/8), and TTA (4/8) were allowed.

[0064] d, Recoding landscape over the genomic region shown in (a) following REXER with a BAC containing Refactoring scheme 2 for the ftsl-murE overlap and TCT at position 4 in map. 2/7 post-REXER clones were completely refactored and recoded, and each target codon was replaced in at least 5/7 clones. The data from (a) is shown for comparison.

[0065] FIG. 6—Recoding me and yceQ in fragment 9.

[0066] a, Recoding landscape of fragment 9. Our designed, synthetic sequence of fragment 9 was integrated into the genome by REXER and 19 clones were completely sequenced by NGS. The recoding landscape graph shows the frequency at which each target codon was recoded across the 19 clones. While most codon replacements were accepted, recoding of a 26 kb region was consistently rejected; codon positions with a recoding frequency of zero in all the sequenced clones are indicated by black dots. To pinpoint the problematic sequence, 10 kb stretches of the genome (G2-7) were deleted in the presence of the episomal copy of synthetic fragment 9. The synthetic sequence was sufficient to support deletion of all stretches except G4 (dark grey box), suggesting that the underlying problem is within this stretch. 0/19 clones were completely recoded.

[0067] b, Recoding landscape of stretch G4. Following REXER across the 10 kb stretch ‘G4’ and sequencing of ten clones the recoding landscape shown was generated. This revealed a clear recoding minima at yceQ, a ‘gene’ that encodes a predicted protein, for which there is no evidence of transcription, protein synthesis or homologs (Pundir, S., et al., 2017. Methods Mol Biol, 1558, 41-55). All target codons in yceQ were recoded at least once in individual clones, but never simultaneously; thus, the minimum of the recoding landscape does not go to zero, and 0/10 clones were completely recoded. This is consistent with epistasis between the targeted positions. In the map below the recoding landscape, sequences annotated as essential and target codons are shown. The sequence position (x axis) is with reference to panel a.

[0068] c, Altered design of region surrounding me in fragment 9. Top, original design of yceQ recoding and me (encoding RNAse E) regulatory sequences. Target codons are shown. Prne1,2,3, are the promoters for the essential gene me; these are found in and around the hypothetical gene yceQ. The −10 sequence of the major promoter P1rne is mutated by our initial design. Sequence containing hairpin 1 (hp1) and hairpin 2 (hp2) that bind to RNAse E to mediate transcript degradation are shown; this sequence encompasses the remaining target codons and is also mutated by our initial design. Bottom, The second codon in yceQ was replaced with a stop codon and the remaining target codons retained their original sequence. The sequence position (x axis) is with reference to panel a.

[0069] d, This modified fragment 9, from c, was integrated on the genome, resulting in complete recoding in 4/5 clones sequenced. The axes of the graph are the same as in panel a. The recoding landscape for the modified fragment 9, derived from sequencing 5 clones, is shown in purple. The data from panel a is reproduced for comparison.

[0070] FIG. 7—Recoding yaaY in fragment 37a.

[0071] a, Recoding landscape of fragment 37a. Our designed, synthetic sequence of fragment 37a was integrated into the genome by REXER and 6 clones were completely sequenced by NGS. While most codon replacements were accepted, recoding of a 6.5 kb region was consistently rejected. Target codon positions that were never recoded in the six clones sequenced are indicated by black dots.

[0072] b, Identification of the problematic target codon. Within the identified 6.5 kb problematic region we first focused on codons in essential genes (dark grey arrows) over non-essential genes (light grey arrows). Sanger sequencing (black bar) of 24 clones showed that 2 clones were recoded in all 6 target codons within a sub-section of the essential genes. Further Sanger sequencing of the remaining target codons in essential genes in these two clones revealed that 1 clone was recoded at all 17 target codons. This clone was completely sequenced by NGS and used to generate a recoding landscape, in which each target codon is either recoded or not recoded. This allowed us, in combination with the recoding landscape in (a), to identify a problematic region 1.8 kb upstream of ribF. Here we focused on the 4 target codons in the genes rpsT and yaaY as the nearest codons to the essential ribF gene. Sanger sequencing of 33 clones across this sequence revealed only 1 codon that was never recoded, the codon for Ser70 in the hypothetical gene yaaY (sequencing results are shown as grey scaled on the gene map of rspT and yaaY). We therefore investigated alternative codon replacements in yaaY.

[0073] c, Alternative codon replacement in the hypothetical gene yaaY. At position Ser70 in this gene, replacement of TCA with AGT was not successful. To investigate alternative codon replacement schemes, a double-selection marker, pheS*-Hyg^{R} on a constitutive EM7 promoter followed by a RBS was introduced into yaaY 12 bp upstream of the codon for Ser70. The negative selection marker was then used to select for clones that had replaced the cassette using linear double stranded DNA that introduces alternative codons at position seventy, via lambda red recombination. While linear double stranded DNA with AGT did not integrate (0/16 clones) integration of dsDNA with TCC (2/16), TCG (2/16), TCT (6/16) and AGC (9/16) proved viable.

[0074] d, Recoding landscape of REXER with a BAC containing a corrected version of fragment 37a, bearing AGC at position Ser70 in the hypothetical gene yaaY. When integrated by REXER, we identified 1/7 completely recoded clones. AGC at position Ser70 in yaaY was introduced in 4/7 clones.

[0075] FIG. 8—Substitutions in the hypothetical gene yceQ overlap with regulatory elements in rne that encodes the essential protein RNAse E.

[0076] a, In our original design, a programmed substitution of a TCA to AGT in the hypothetical gene yceQ leads to mutation of the −10 promoter element of P1rne, (boxed). The transcriptional start site (tss) of this promoter, for me transcription, is indicated by an arrow; this is the major promoter for me transcription.

[0077] b, Target codon substitutions overlap with and may potentially disrupt the key regulatory hairpins hp2 and hp3 in the long 5′ UTR of the me transcript. hp2 and hp3 mediate the regulatory feedback loop in which RNAse E is recruited to the mRNA to promote degradation of its own transcript. Shown is a schematic of the wild-type secondary structure of the me 5′ UTR (Diwa, A., et al., 2000 Genes Dev 14, 1249-1260). The target codons for synonymous replacement are highlighted.

[0078] FIG. 9—Completing Sections A−B and H.

[0079] a, GENESIS was initiated with fragment 4 and proceeded smoothly until fragment 9, in which we were unable to recode yceQ. Identifying and fixing the problems with our initial design of fragment 9 was carried out as described in FIG. 6, by means of introducing a stop codon at the start of the predicted yceQ ORF. Following a swap of the sacB-Cm^{R} (sC) double selection cassette at the end of fragment 9 for a pheS*-Hyg^{R} (pH) double selection cassette this strain was ready to act as the recipient for conjugation to assemble a strain in which fragments 4-13 (sections A+B) are fully recoded. In parallel, we continued to recode the strain containing the recoded fragments 4 to incomplete fragment 9 by GENESIS; this generated a second strain for assembly in which fragments 4-8 and 10-13 were completely recoded, and fragment 9 was partially recoded. We then integrated oriT 3 kb upstream of the start of fragment 10 in the second strain to generate a donor for conjugation to assemble a strain in which fragments 4-13 (sections A+B) are fully recoded. Conjugation of the donor and recipient strains resulted in a strain in which sections A and B are fully recoded.

[0080] b, Individual REXER of fragments 37a and 1 led to incomplete recoding. We carried out troubleshooting of both independently (FIG. 5, FIG. 7). The repairs are indicated. Each strain then served as a starting point for two independent sets of GENESIS—one generated 37a-37b (on the left) and ended with an rpsL-Kan^{R} (rK) cassette and one generated 1-3 (on the right) and ending in a sacB-Cm^{R} cassette. We integrated an oriT 3 kb upstream of the start of fragment 1, and this strain served as a donor for the directed conjugation of 1-3 into 37a-37b. The correct product was selected for by the gain of Cm^{R} and the loss of rpsL. This resulted in the completion of section H in a single strain.

[0081] FIG. 10—Assembly of an organism with a fully synthetic genome via conjugation of recoded genome sections.

[0082] Synthetic genomic sections from multiple, individual partially-recoded genomes were assembled into a single, fully-recoded genome via conjugation (Ma, N. J., et al., 2014. Nat Protoc 9, 2285-2300). The donor (d) and recipient (r) strains harbour unique recoded genomic sections; recoded overlapping homology regions (3 kb to 400 kb) were utilized to seamlessly recombine the strains. Small homology regions ranging from 3-5 kb are denoted with an asterisk (*). Conjugations for which we used greater than 5 kb homology (HR) are indicated with text. For assembly, the recoded genomic content from the donor was conjugated in a clockwise manner to replace the corresponding wt genomic section in the recipient. The origin of strain AB and H is described in detail in FIG. 9, while all other individual synthetic genomes were generated by GENESIS (FIG. 4). Conjugation followed by recombination proceeded until the final, fully-recoded, A-H strain was assembled and sequence verified by NGS sequencing.

[0083] FIG. 11—Assembly of recoded genome sections into a fully-recoded organism.

[0084] a, Schematic assembly of partially synthetic donor and recipient genomes into a more synthetic genome, through conjugation. In the recipient cell, the recoded genome section is extended with recoded DNA, commonly 3-4 kb, by a lambda red mediated recombination and positive and negative selection; this step takes advantage of the genomic markers at the end of the recoded sequence that are introduced by GENESIS, and provides a homology region with the end of the recoded fragment in the donor strain. The donor strain is prepared by integration of an origin of transfer (oriT) at the end of the recoded DNA. The indicated positive and negative selections ensure the survival of recipient strains, and select for recipients that have successfully integrated the synthetic DNA from the donor. An F′ plasmid containing a mutation in the oriT sequence that makes it non-transferrable was used to facilitate conjugation of the donor genome to the recipient. +2, Cm^{R}; −2, SacB; +3, Hyg^{R}; −3, pheS*; +4 Gentamycin^{R}; +5, Tetracycline^{R}.

[0085] b, Synthetic genomic sections from multiple, individual partially-recoded genomes were assembled into a single, fully-recoded genome via the indicated sequence of conjugations. The donor (d) and recipient (r) strains harbor unique recoded genomic sections. The recoded genomic content from the donor was conjugated in a clockwise manner to replace the corresponding WT genomic section in the recipient. Conjugation proceeded until the final, fully-recoded A-H strain was assembled. FIG. 10 shows the process in more detail, including all homology regions.

[0086] FIG. 12—Functional consequences of synonymous codon compression in Syn61.

[0087] a, Synonymous codon compression and deletion of prfA, serU and serT. The grey box shows the serine codons and stop codons, together with the tRNAs and release factors that decode them in WT E. coli (WT genome). tRNA anticodons and release factors are connected to the codons they read by black lines. The tRNA and release factor genes are shown in the black boxes. serT is the sole tRNA that decodes TCA codons in WT E. coli, and is absolutely essential. Synonymous codon compression (Syn. Codon. Comp.) leads to a recoded genome in which i) tRNAs with CGA anticodons should have no cognate codons and ii) serT should be dispensable. All factors that read the target codons should be dispensable in Syn61.

[0088] b, Co-translational incorporation of the non canonical amino acid (ncAA) Nε-(((2-methylcycloprop-2-en-1-yl) methoxy) carbonyl)-L-lysine (CYPK), using the orthogonal MmPyIRS/tRNA^{Pyl}CGA pair, was toxic in MDS42 but not Syn61. When provided with CYPK, this pair will incorporate the ncAA in response to TCG codons in a dose dependent manner. In MDS42 this incorporation leads to mis-synthesis of the proteome and toxicity. However, in Syn61, which does not contain TCG codons, this is non-toxic. The lines follow the mean of three biological replicates (each shown as a dot) at each [CYPK] (0 mM, 0.5 mM, 1 mM, 2.5 mM and 5 mM). “% Max Growth” was determined by the final OD₆₀₀ with the indicated concentration of CYPK divided by the final OD₆₀₀ in the absence of CYPK. Final OD₆₀₀s were determined after 600 min.

[0089] c, Synonymous codon compression enables deletion of serT in Syn61. PCR flanking the serT locus before (−) and after (clones 1 and 2) replacement with a PheS*-Hyg^{R} cassette. Also see FIG. 14. Full gels in FIG. 16.

[0090] FIG. 13—Characterization of an organism with a fully synthetic genome.

[0091] a, Doubling times for Syn61 and MDS42. Our fully synthetic, recoded E. coli Syn61 has a doubling time 1.6 times higher than that of the parent strain MDS42 (Posfai, G. et al., 2006. Science 312, 1044-1046) when grown in standard media conditions (90.1 min vs. 57.6 min in LB+2% glucose). The ratio of growth rates between Syn61 and MDS42 in LB (decreased carbon catabolite repression) at 37° C. is 1.7, in M9 minimal media is 1.7, in richer media (2XTY) is 1.4, in LB at 25° C. is 2.5, and in LB at 42° C. is 1.3. Listed are the doubling times for MDS42 and Syn61, respectively, in different media conditions: LB at 37° C., 58.3 min, and 100.6 min; LB+2% Glucose, 57.6 min, and 90.1 min; M9 minimal media, 130.5 min, and 221.1 min; 2XTY, 68.2 min, 92.6 min; LB at 25° C., 86.3 min, and 218.4 min; LB at 42° C., 77.4 min, and 99.7 min. Syn61 harboring a plasmid without (−) or with (+) serV exhibited a growth rate ratio of 0.99 (138.3 min vs. 136.2 min). Doubling times represent the average of ten independently grown biological replicates of each strain±standard deviation from the mean (see Methods).

[0092] b, Representative microscopy images of E. coli strain MDS42 and Syn61. Samples were imaged on an upright Zeiss Axiophot phase contrast microscope using a 63×1.25NA Plan Neofluar phase objective (see Methods).

[0093] c, Histogram of cell lengths quantified from microscopy images of strains MDS42 and Syn61. The mean cell length for MDS42 was 1.97±0.57 μm and for Syn61 was 2.3±0.74 pm. Images of n=500 cells were taken during exponential growth phase for both strains. Cell length measurements were made with Nikon NIS Elements software (see Methods).

[0094] d, Label-free quantification of the MDS42 and Syn61 proteomes. Each strain was grown in three biological replicates. Each biological replicate was analysed by tandem mass spectrometry in technical duplicate. Technical duplicates of biological replicates were merged. A total of 1,084 proteins were quantified across the samples. P-values for abundance differences were calculated by two-sample T-test for the proteins quantified in at least two biological replicates. The data showed that the abundance of three proteins was significantly (P=0.01) different between the strains: Aminopeptidase N (P04825) and peptidase T (P29745) were overrepresented in Syn61, while 30S ribosomal protein S20 (P0A7U7) was underrepresented. No protein differed in abundance, as judged by LFQ values, by more than 1.14 fold between strains.

[0095] FIG. 14—Consequences of synonymous codon compression in Syn61.

[0096] a, Synonymous codon compression and deletion of prfA, serU and serT in E. coli. The grey box shows the E. coli serine codons and stop codons, together with the tRNAs and release factors that decode them in WT E. coli (WT genome). tRNA anticodons and release factors are connected to the codons they read by black lines. The tRNA and release factor genes are shown in the black boxes. Synonymous codon compression (Syn. Codon. Comp.) leads to Syn61 cells with a recoded genome in which TCG and TCA codons are removed. The abundance of each codon is listed in its box.

[0097] b, As in FIG. 12b, but with the indicated MmPyIRS/tRNA^{Pyl} anticodon, UGA. There are less cognate codons to this tRNA in Syn61 than in MDS42, therefore CYPK addition might be expected to be less toxic in Syn61, as observed.

[0098] c, As in FIG. 12b, but with the indicated MmPyIRS/tRNA^{Pyl} anticodon, GCU. There are more cognate codons to this tRNA in Syn61 than in MDS42, therefore CYPK addition might be expected to be more toxic in Syn61, as observed.

[0099] d, serT (dark grey) is deleted by insertion of a PheS*-Hyg^{R} cassette (black) via lambda-red mediated recombination. Recombination yields new junctions 1 and 2, as indicated. For each recombination, both junctions were sequence-verified by Sanger sequencing. Above the Sanger chromatograms, the arrows indicate the precise location of the junction, the sequence corresponding to the selection cassette and the bar corresponds to the genomic sequence flanking the selection cassette. The primers used to generate selection cassettes with suitable homologies to serU, serT and prfA for recombination are provided in FIG. 23.

[0100] e, prfA (dark grey) is deleted by insertion of an rpsL-Kan^{R} (in black) via lambda-red mediated homologous recombination. The agarose gels are annotated as described in FIG. 12c and the rest of the data is annotated as described in panel d. Full gel available in FIG. 16.

[0101] f, serU (dark grey) is deleted by insertion of a PheS*-Hyg^{R} cassette (in black) via lambda-red mediated recombination. The agarose gels are annotated as described in FIG. 12c and the rest of the data is annotated as described in panel d. Full gel available in FIG. 16.

[0102] FIG. 15—The scale of genome synthesis and scale and fidelity of recoding.

[0103] a, Genome and chromosome synthesis. The size (Mb) of synthetic genomes that have been produced for M. genitalium and M. mycoides (Gibson, D. G. et al., 2008. Science 319, 1215-1220; and Gibson, D. G. et al., 2010. Science 329, 52-56) and several S. cerevisiae chromosomes (Shen, Y. et al., 2017. Science 355, aaf4791; Annaluru, N. et al., 2014. Science 344, 55-58; Xie, Z. X. et al., 2017. Science 355, aaf4704; Mitchell, L. A. et al., 2017. Science 355, aaf4831; Dymond, J. S. et al., 2011. Nature 477, 471-476; Wu, Y. et al., 2017. Science 355, aaf4706; Zhang, W. et al., 2017. Science 355, aaf3981; and Richardson, S. M. et al., 2017. Science 355, 1040-1044) are shown in light grey. The size of the synthetic E. coli genome presented here is shown in dark grey.

[0104] b, Genome recoding efforts. Attempts to recode target codons TTA and TTG in S. typhimurium (Lau, Y. H. et al., 2017. Nucleic Acids Res 45, 6971-6980) ; AGC, AGT, TTG, TTA, AGA, AGG, and TAG in E. coli (Ostrov, N. et al., 2016. Science 353, 819-822); AGA and AGG in E. coli (Napolitano, M. G. et al., 2016. Proc Natl Acad Sci USA 113, E5588-5597), as well as recoding of all TAG in E. coli (Lajoie, M. J. et al., 2013. Science 342, 357-360) are shown in light grey. Compared to removal of all TCA, TCG, and TAG in E. coli presented here (dark grey). The total number of codons recoded in a single strain are shown on the graph, and the maximum percentage of target codons recoded in a single strain in each effort is indicated.

[0105] c, Number of reported non-programmed mutations and indels as a function of the number of target codons recoded for the experiments shown in b.

[0106] FIG. 16—Full gels for FIG. 12

[0107] Full gels are shown with corresponding Figure panel. The molecular size standards are annotated and the area shown in the relevant Figure is indicated by a white outline.

[0108] FIG. 17—Codon and anticodon interactions in the E. coil genome

[0109] 28 sense codons are highlighted in grey, along with the amber stop codon. The genome wide removal of these sense codons, but not other sense codons, would enable all their cognate tRNA to be deleted without removing the ability to decode one or more sense codons remaining in the genome. This is necessary but not sufficient for the reassignment of sense codons to unnatural monomers. Serine, leucine and alanine codon boxes are highlighted because the endogenous aminoacyl-tRNA synthetases for these amino acids do not recognize the anticodons of their cognate tRNAs. This may facilitate the assignment of codons within these boxes to new amino acids through the introduction of tRNAs bearing cognate anticodons that do not direct mis-aminocylation by endogenous synthetases. The number of total codon counts for all 64 triplet codons in the MDS42 genome (GenBank accession no. AP012306), all known codon-anticodon interactions through both Watson-Crick base-paring and wobbling, base modification on tRNA anticodons, tRNA genes, and measured in vivo tRNA relative abundance are reported. This analysis identifies 10 codons from the serine, leucine, and alanine groups (serine codon TCG, TCA, AGT, AGC; leucine codon CTG, CTA, TTG, TTA; and alanine codon GCG, GCA) satisfy both the codon-proteinogenic anticodon interaction and aminoacyl-tRNA synthetases recognition criteria for codon reassignment.

[0110] FIG. 18—Designed synthetic E. coil genome (SEQ ID NO: 1)

[0111] A version of the E. coli MDS42 genome in which the serine codons TCG and TCA and the stop codon TAG in open reading frames (ORFs) are systematically replaced by their synonyms AGC, AGT, and TAA, respectively. Using the defined rules for synonymous codon compression and refactoring a genome is designed in which all 18,218 target codons are recoded to their target synonyms.

[0112] FIG. 19—Final synthetic E. coil genome (Syn61) (SEQ ID NO: 2)

[0113] Sequence of E.coli Syn61, in which all 1.8×10⁴ target codons in the genome are recoded. The synthesis of our recoded genome introduced only eight non-programmed mutations (Table 6), four of these mutations arose during the preparation of the 100 kb BACs, and four during the recoding process.

[0114] FIG. 20—BACs for assembling synthetic genome

[0115] a, BAC-sacB-CmR-rpsL. The nucleotide sequence for an annotated BAC vector harbouring a sacB-CmR selection cassette flanked upstream by a 5′ homology region (HR) and CRISPR/Cas9 protospacer sequence (spacer 1). The sacB-CmR cassette is flanked downstream by a 3′ homology region, a CRISPR/Cas9 protospacer sequence (spacer 2), and an rpsL selection marker.

[0116] b,—BAC-rpsL-KanR-sacB. The nucleotide sequence for an annotated BAC vector harbouring an rpsL-KanR selection cassette flanked upstream by a 5′ homology region (HR) and CRISPR/Cas9 protospacer sequence (spacer 1). The rpsL-KanR cassette is flanked downstream by a 3′ homology region, a CRISPR/Cas9 protospacer sequence (spacer 2), and a sacB selection marker.

[0117] c, BAC-rpsL-KanR-pheS*-HygR. The nucleotide sequence for an annotated BAC vector harbouring an rpsL-KanR selection cassette flanked upstream by a 5′ homology region (HR) and CRISPR/Cas9 protospacer sequence (spacer 1). The rpsL-KanR cassette is flanked downstream by a 3′ homology region, a CRISPR/Cas9 protospacer sequence (spacer 2), and a pheS*-HygR selection marker.

[0118] d, Table of BAC Construction. Oligonucleotides and selection markers used to construct BACs with synthetic DNA for REXER and homology regions between synthetic DNA fragments. The second tab lists the plasmid backbone and protospacer sequences used for REXER.

[0119] FIG. 21—Exemplary spacer plasmid maps a, Spacer plasmid map. Exemplary map of pKW1_MB1amp_Spacers_REXER2 containing the CRISPR insert with spacer sequences used as linear or circular spacers for REXER.

[0120] b, Second generation spacer plasmid map. Exemplary map of pKW3_MB1amp_spacers_REXER2 containing the CRISPR insert with spacer sequences used as circular 2nd generation spacers for REXER.

[0121] FIG. 22—Constructs for conjugation

[0122] a, Gentamycin resistance OriT cassette.

[0123] b, Primers for conjugation constructs. Oligonucleotide primers used for conjugation.

[0124] c, pJF146. F′ plasmid that does not self-transfer.

[0125] FIG. 23—Primers for deletion experiments

[0126] Oligonucleotide primers used for deletion of the tRNAs serT and serU and release factor prfA in Syn61.

### DETAILED DESCRIPTION

[0127] The terms “comprising”, “comprises” and “comprised of” as used herein are synonymous with “including” or “includes”; or “containing” or “contains”, and are inclusive or open-ended and do not exclude additional, non-recited members, elements or steps. The terms “comprising”, “comprises” and “comprised of” also include the term “consisting of”.

[0128] Synthetic Genomes

[0129] Genomes

[0130] As used herein, a “genome” is the genetic material of an organism, including both genes and non-coding DNA. As used herein, a “synthetic genome” is a synthetically-built genome. Typically a synthetic genome will be produced by genetic modification of a pre-existing (i.e. “parent”) genome. Thus, a synthetic genome may be derived from a parent genome, i.e. identical to a parent genome, except comprising one or more genetic modifications. The skilled person will be able to readily identify the parent genome on which a synthetic genome is based and the genetic modifications carried out. As used herein, a “parent genome” may be any naturally-occurring, commercially-available, deposited, catalogued or otherwise well-known genome, or derivative thereof.

[0131] The synthetic genome of the present invention is a synthetic prokaryotic genome. A prokaryote is a unicellular organism that lacks a membrane-bound nucleus, mitochondria, or any other membrane-bound organelle. Prokaryotes are divided into two domains, Archaea and Bacteria. The genome of prokaryotic organisms generally is a circular, double-stranded piece of DNA, multiple copies of which may exist at any time.

[0132] Preferably, the synthetic genome of the present invention is a synthetic bacterial genome. Preferably the synthetic bacterial genome is suitable for heterologous protein production, in particular the production of polypeptides comprising one or more non-proteinogenic amino acids (for instance those described by Ferrer-Miralles, N. and Villaverde, A., 2013. Microbial Cell Factories, 12:113). Suitable bacterial genomes include: escherichia (e.g. Escherichia coil), caulobacteria (e.g. Caulobacter crescentus), phototrophic bacteria (e.g. Rodhobacter sphaeroides), cold adapted bacteria (e.g. Pseudoalteromonas haloplanktis, Shewanella sp. strain Ac10), pseudomonads (e.g. Pseudomonas fluorescens, Pseudomonas putida, Pseudomonas aeruginosa), halophilic bacteria (e.g. Halomonas elongate, Chromohalobacter salexigens), streptomycetes (e.g. Streptomyces lividans, Streptomyces griseus), nocardia (e.g. Nocardia lactamdurans), mycobacteria (e.g. Mycobacterium smegmatis), coryneform bacteria (e.g. Corynebacterium glutamicum, Corynebacterium ammoniagenes, Brevibacterium lactofermentum), bacilli (e.g. Bacillus subtilis, Bacillus brevis, Bacillus megaterium, Bacillus licheniformis, Bacillus amyloliquefaciens), and lactic acid bacteria (e.g. Lactococcus lactis, Lactobacillus plantarum, Lactobacillus casei, Lactobacillus reuteri, Lactobacillus gassen) genomes. In some embodiments the synthetic genome is a synthetic gram-negative bacterial genome.

[0133] Bacterial genomes can range in size anywhere from about 130 kb to over 14 Mb. Thus, in some embodiments the synthetic prokaryotic genome of the present invention is 100 kb to 20 Mb, or 130 kb to 15 Mb, or 200 kb to 15 Mb, or 300 kb to 15 Mb, or 500 kb to 15 Mb, or 1 Mb to 15 Mb, or 1 Mb to 10 Mb, or 1 Mb to 8 Mb, or 1 Mb to 6 Mb, or 2 Mb to 6 Mb, or 2 Mb to 5Mb, or 3 Mb to 5 Mb, or about 4 Mb in size. The synthetic prokaryotic genome may comprise 100 or more, 200 or more, 300 or more, 400 or more, 500 or more, 600 or more, 700 or more, 800 or more, 900 or more, 1000 or more, 1500 or more, or 2000 or more genes, preferably 1000 or more genes. The synthetic prokaryotic genome may comprise 100 or more, 200 or more, 300 or more, 400 or more, 500 or more, 600 or more, 700 or more, 800 or more, 900 or more, 1000 or more, 1500 or more, or 2000 or more genes for which there is evidence of translation and/or of the predicted protein product, preferably 1000 or more genes. Preferably the synthetic prokaryotic genome comprises 100 or more, 200 or more, 300 or more, 400 or more, 500 or more essential genes, preferably 300 or more essential genes.

[0134] Preferably, the synthetic genome of the present invention is a synthetic Escherichia coli, Salmonella enterica, or Shigella dysenteriae genome. These are phylogenetically related species as disclosed by Lukjancenko, O., et al., 2010. Microbial ecology, 60(4), pp.708-720; and Karberg, K. A., et al., 2011. PNAS, 108(50), pp.20154-20159.

[0135] More preferably, the synthetic genome of the present invention is a synthetic E. coli genome. The parent genome may be any suitable E. coli genome including MDS42, K-12, MG1655, BL21, BL21(DE3), AD494, Origami, HMS174, BLR(DE3), HMS174(DE3), Tuner(DE3), Origami2(DE3), Rosetta2(DE3), Lemo21(DE3), NiCo21(DE3), T7 Express, SHuffle Express, C41(DE3), C43(DE3), and m15 pREP4 or derivatives thereof (Rosano, G. L. and Ceccarelli, E. A., 2014. Frontiers in microbiology, 5, p.172). Most preferably, the parent genome is MDS42, MG1655, or BL21 or a derivative thereof. MG1655 is considered as the wild type strain of E coli. The GenBank ID of genomic sequence of this strain is 000096. BL21 is widely available commercially. For example, it can be purchased from New England BioLabs with catalog number C2530H (https://www.neb.com/products/c2530-bl21-competent-e-coli).

[0136] In some embodiments the synthetic genome is a reduced synthetic genome or a minimal synthetic genome. A “reduced genome” is one in which the size of the parent genome has been reduced by removing non-essential genes and/or non-coding regions. A “minimal genome” is a genome which has been reduced to its minimal size whilst remaining viable e.g. by deletion of all non-essential regions of the genome.

[0137] The synthetic genome of the present invention may be a viable genome. As used herein, a “viable genome” refers to a genome that contains nucleic acid sequences sufficient to cause and/or sustain viability of a cell, e.g., those encoding molecules required for replication, transcription, translation, energy production, transport, production of membranes and cytoplasmic components, and cell division.

[0138] Preferably one or more tRNA or release factors may be deleted from the synthetic genome and the synthetic genome may remain viable. For example, a tRNA which decodes only the one or more sense codons that have been replaced (or deleted) may be dispensable. Similarly, a tRNA which decodes the one or more sense codons that have been replaced (or deleted) may be dispensable if the remaining sense codons that it decodes may also be decoded by an alternative tRNA. For example, serT, encoding tRNA^{ser}UGA, is the only tRNA that decodes TCA codons in E. coli, and is therefore normally essential. However, if the synthetic genome does not contain TCA codons then serT may be dispensable.

[0139] Sense Codons

[0140] The current invention provides a synthetic prokaryotic genome comprising 5 or fewer occurrences of one or more sense codons; and/or a synthetic prokaryotic genome derived from a parent genome, wherein the synthetic prokaryotic genome comprises less than 10%, 5%, 2%, 1%, 0.5%, 0.1% of the occurrences of one or more sense codons, relative to the parent genome; and/or a synthetic prokaryotic genome comprising 100 or more, 200 or more, or 1000 or more genes with no occurrences of one or more sense codons.

[0141] The one or more sense codons may consist of one, two, three, four, five, six, seven, or eight sense codons. Preferably, the one or more sense codons consist of one sense codon or two sense codons, most preferably two sense codons.

[0142] The synthetic prokaryotic genome may comprise 5 or fewer (e.g. 5, 4, 3, 2, 1), or no occurrences of one or more (e.g. 1, 2, 3, 4, 5, 6, 7, or 8) sense codons. In some embodiments the synthetic prokaryotic genome comprises 5 or fewer (e.g. 5, 4, 3, 2, 1, 0) of each of the one or more (e.g. 1, 2, 3, 4, 5, 6, 7, or 8) sense codons. In other embodiments the synthetic prokaryotic genome comprises 5 or fewer (e.g. 5, 4, 3, 2, 1, 0) of the one or more (e.g. 1, 2, 3, 4, 5, 6, 7, or 8) sense codons combined (i.e. in total). In preferred embodiments the synthetic prokaryotic genome comprises no occurrences of one sense codon. In other preferred embodiments the synthetic prokaryotic genome comprises no occurrences of two sense codons.

[0143] The synthetic prokaryotic genome may be derived from a parent genome and comprise 5 or fewer (e.g. 5, 4, 3, 2, 1), or no occurrences of one or more (e.g. 1, 2, 3, 4, 5, 6, 7, or 8) native sense codons. In some embodiments the synthetic prokaryotic genome comprises 5 or fewer (e.g. 5, 4, 3, 2, 1, 0) of each of the one or more (e.g. 1, 2, 3, 4, 5, 6, 7, or 8) native sense codons. In other embodiments the synthetic prokaryotic genome comprises 5 or fewer (e.g. 5, 4, 3, 2, 1, 0) of the one or more (e.g. 1, 2, 3, 4, 5, 6, 7, or 8) native sense codons combined (i.e. in total). In preferred embodiments the synthetic prokaryotic genome is derived from a parent genome and comprises no occurrences of one native sense codon. In other preferred embodiments the synthetic prokaryotic genome is derived from a parent genome and comprises no occurrences of two native sense codons.

[0144] In some embodiments the synthetic prokaryotic genome comprises 100 or more, 200 or more, 300 or more, 400 or more, 500 or more, 600 or more, 700 or more, 800 or more, 900 or more, 1000 or more, 1500 or more, or 2000 or more genes, preferably 1000 or more genes. In some embodiments the genes are those for which there is evidence of translation and/or of the predicted protein product. For example, the synthetic prokaryotic genome may comprise 100 or more, 200 or more, 300 or more, 400 or more, 500 or more 600 or more, 700 or more, 800 or more, 900 or more, 1000 or more, 1500 or more, or 2000 or more genes, preferably 1000 or more genes for which there is evidence of translation and/or of the predicted protein product. Preferably the synthetic prokaryotic genome comprises 100 or more, 200 or more, 300 or more, 400 or more, 500 or more essential genes, preferably 300 or more essential genes. Preferably the (essential) genes have no occurrences of the one or more sense codons.

[0145] The synthetic prokaryotic genome may comprise less than 10%, 5%, 2%, 1%, 0.5%, 0.1% of the occurrences of one or more (e.g. 1, 2, 3, 4, 5, 6, 7, or 8) sense codons, relative to the parent genome. In some embodiments the synthetic prokaryotic genome comprises less than 10%, 5%, 2%, 1%, 0.5%, 0.1% of the occurrences of each of the one or more (e.g. 1, 2, 3, 4, 5, 6, 7, or 8) sense codons, relative to the parent genome. In other embodiments the synthetic prokaryotic genome comprises less than 10%, 5%, 2%, 1%, 0.5%, 0.1% of the occurrences of the one or more (e.g. 1, 2, 3, 4, 5, 6, 7, or 8) sense codons combined, relative to the parent genome. In preferred embodiments the synthetic prokaryotic genome comprises less than 10%, 5%, 2%, 1%, 0.5%, 0.1% of one sense codon, relative to the parent genome. In other preferred embodiments the synthetic prokaryotic genome comprises less than 10%, 5%, 2%, 1%, 0.5%, 0.1% of two sense codons, relative to the parent genome.

[0146] The synthetic prokaryotic genome may comprise 100 or more, 200 or more, or 1000 or more genes with no occurrences of one or more (e.g. 1, 2, 3, 4, 5, 6, 7, or 8) sense codons. Preferably, all or substantially all the genes in the synthetic prokaryotic genome have no occurrences of the one or more (e.g. 1, 2, 3, 4, 5, 6, 7, or 8) sense codons. In preferred embodiments, all or substantially all the genes in the synthetic prokaryotic genome have no occurrences of one sense codon. In other preferred embodiments, all or substantially all the genes in the synthetic prokaryotic genome have no occurrences of two sense codons. By substantially all is meant all but 10 or fewer (e.g. 10, 9. 8, 7, 6, 5, 4, 3, 2, 1, or 0) genes comprise occurrences of the one or more sense codons.

[0147] The synthetic prokaryotic genome may comprise 100 or more, 200 or more, or 1000 or more genes with no occurrences of one or more (e.g. 1, 2, 3, 4, 5, 6, 7, or 8) native sense codons. Preferably, all or substantially all the genes in the synthetic prokaryotic genome have no occurrences of the one or more (e.g. 1, 2, 3, 4, 5, 6, 7, or 8) native sense codons. In preferred embodiments, all or substantially all the genes in the synthetic prokaryotic genome have no occurrences of one native sense codon. In other preferred embodiments, all or substantially all the genes in the synthetic prokaryotic genome have no occurrences of two native sense codons. By substantially all is meant all but 10 or fewer (e.g. 10, 9. 8, 7, 6, 5, 4, 3, 2, 1, or 0) genes comprise occurrences of the one or more native sense codons.

[0148] Preferably the genes encode proteins (e.g. the genes are those for which there is evidence of translation and/or of the predicted protein product) and/or the genes are essential genes. Thus, in more preferred embodiments the synthetic prokaryotic genome comprises 100 or more, 200 or more, or 1000 or more protein-encoding and/or 100 or more, 200 or more, or 300 or more essential genes with no occurrences of one or two sense codons. In other more preferred embodiments all or substantially all the protein-encoding and/or essential genes in the synthetic prokaryotic genome comprise no occurrences of one or two sense codons.

[0149] In preferred embodiments no proteins are translated from any of the remaining occurrences of the one or more sense codons and/or genes comprising the remaining occurrences of the one or more sense codons are putative or non-coding genes. In some embodiments the translation of the genes comprising the remaining occurrences of the one or more sense codons is reduced and/or prevented (e.g. the genes may comprise stop codons in the 5′ sequence).

[0150] Any remaining occurrences of the sense codons may be necessary to ensure that the synthetic prokaryotic genome is viable. For example, one or more, preferably all, of the remaining occurrences of the one or more sense codons in the synthetic prokaryotic genome may be present in the regulatory elements of essential genes; and/or one or more, preferably all, of the remaining occurrences of the one or more sense codons may be in genes in which there is no evidence for translation or the predicted protein product (i.e. putative or non-coding genes).

[0151] As used herein, a “sense codon” is a nucleotide triplet that codes for an amino acid. Thus, sense codons may be identified in a genome by gene prediction, i.e. by identifying regions of the genome that code for proteins (i.e. genes) and the corresponding open reading frames (ORFs). Typically, genomes naturally comprise 61 sense codons: GCT, GCC, GCA, GCG, CGT, CGC, CGA, CGG, AGA, AGG, AAT, AAC, GAT, GAC, TGT, TGC, CAA, CAG, GAA, GAG, GGT, GGC, GGA, GGG, CAT, CAC, ATT, ATC, ATA, TTA, TTG, CTT, CTC, CTA, CTG, AAA, AAG, ATG, TTT, TTC, CCT, CCC, CCA, CCG, TCT, TCC, TCA, TCG, AGT, AGC, ACT, ACC, ACA, ACG, TGG, TAT, TAC, GTT, GTC, GTA, and GTG (read from 5′ to 3′ on the coding strand of DNA). The standard genetic code encodes the 20 canonical amino acids using the 61 triplet codons. 18 of the 20 amino acids are encoded by more than one synonymous codon (see FIG. 17). The one or more sense codons may be one or more native sense codons, i.e. sense codons which are present in the parent genome.

[0152] The 61 sense codons in DNA are transcribed into corresponding mRNA and subsequently decoded by one or more tRNAs. tRNAs carry an amino acid to a ribosome as directed by the sense codons in the mRNA. The tRNAs can recognise one or more sense codons via a complementary anticodon. A sequence of sense codons is subsequently translated into a polypeptide (i.e. a sequence of amino acids). Codon and anticodon interactions in the E. coli genome are shown in FIG. 17.

[0153] Preferably, the genome wide removal of the one or more sense codons, but not other sense codons, enables all the cognate tRNA corresponding to said one or more sense codons to be deleted without removing the ability to decode the one or more sense codons remaining in the genome. Thus, the one or more sense codons may be selected from: TCG, TCA, AGT, AGC, GCG, GCA, GTG, GTA, CTG, CTA, TTG, TTA, ACG, ACA, CCG, CCA, CGG, CGA, CGT, CGC, AGG, AGA, GGG, GGA, GGT, GGC, ATT, and ATC.

[0154] Aminoacyl-tRNA synthetases for serine, leucine and alanine do not recognize the anticodons of their cognate tRNAs. This may facilitate the assignment of codons within these boxes to new amino acids through the introduction of tRNAs bearing cognate anticodons that do not direct mis-aminocylation by endogenous synthetases. Thus, the one or more sense codons may be selected from: TCG, TCA, TCT, TCC, AGT, AGC, GCG, GCA, GCT, GCC, CTG, CTA, CTT, CTC, TTG, and TTA.

[0155] Preferably, the one or more sense codons fulfill both these criteria, thus the one or more sense codons may be selected from: TCG, TCA, AGT, AGC, GCG, GCA, CTG, CTA, TTG, and TTA. More preferably, the one of more sense codons are selected from TCG, TCA, AGT, AGC, TTG, TTA, GCG and GCA. Most preferably, the one of more sense codons are TCG and/or TCA.

[0156] Preferably, one or more sense codons are removed such that the genome is compatible with codon reassignment to non-proteinogenic amino acids. Thus, the one or more sense codons may comprise one or more of TCA, CTA, or TTA. Alternatively, two or more sense codons are removed, wherein the two or more sense codons comprise one or more of the sense codon pairs, selected from the group consisting of: GCG and GCA; GCT and GCC; TCG and TCA; AGT and AGC; TCT and TCC; CTG and CTA; TTG and TTA; and CTT and CTC. Preferably, two or more sense codons are removed, wherein the two or more sense codons comprise one or more of the sense codon pairs, selected from the group consisting of: GCG and GCA; TCG and TCA; AGT and AGC; CTG and CTA; and TTG and TTA. More preferably, the two or more sense codons comprise TCG and TCA.

[0157] To achieve removal of sense codons they may be replaced with synonymous sense codons. This is preferable to ensure that the encoded protein sequence is not changed. For instance, the present invention provides a synthetic prokaryotic genome wherein 90% or more, 95% or more, 98% or more, 99% or more, 99.5% or more, 99.6% or more, 99.7% or more, 99.8% or more, 99.9% or more, or 100% of the occurrences of one or more sense codons in the parent genome are replaced with synonymous sense codons. The person skilled in the art is able to deduce suitable synonymous sense codon replacements. For example, in E. coli, typically TCG, TCA, TCT, TCC, AGT and AGC all encode serine; typically GCG, GCA, GCT and GCC all encode alanine; typically CTG, CTA, CTT, CTC, TTG and TTA all encode leucine.

[0158] In some embodiments, the replacement is a defined replacement, i.e. one sense codon is replaced with a single synonymous sense codon. Preferably, 90% or more, 95% or more, 98% or more, 99% or more, 99.5% or more, 99.6% or more, 99.7% or more, 99.8% or more, 99.9% or more, or 100% of the occurrences of one or more sense codons in the parent genome are replaced with a defined (i.e. single) synonymous sense codon.

[0159] For example, the defined replacement may be: GCG replaced with either GCT or GCC; GCA replaced with either GCT or GCC; TCG replaced with any one of TCT, TCC, AGT, or AGC; TCA replaced with any one of TCT, TCC, AGT, or AGC; AGT replaced with any one of TCG, TCA, TCT, or TCC; AGC replaced with any one of TCG, TCA, TCT, or TCC; CTG replaced with any one of CTT, CTC, TTG or TTA; CTA replaced with any one of CTT, CTC, TTG or TTA; TTG replaced with any one of CTG, CTA, CTT or CTC; or TTA replaced with any one of CTG, CTA, CTT or CTC. Preferably the one or more defined sense codon replacements are selected from one or more of: GCG to either GCT or GCC; GCA to either GCT or GCC; TCG to either AGT or AGC; TCA to either AGT or AGC; AGT to either TCA or TCT; AGC to either TCG or TCC or TCA; TTG to CTT; and TTA to CTC. More preferably, TCG and/or TCA are replaced with AGC and/or AGT. Most preferably, TCG is replaced with AGC and/or TCA is replaced with AGT.

[0160] Preferably, the defined replacement is such that the genome is compatible with codon reassignment to non-proteinogenic amino acids. For example: (i) GCG may be replaced with either GCT or GCC, and GCA may be replaced with either GCT or GCC; (ii) TCG may be replaced with any of TCT, TCC, AGT, or AGC, and TCA may be replaced with any of TCT, TCC, AGT, or AGC; (iii) AGT may be replaced with any of TCG, TCA, TCT, or TCC, and AGC may be replaced with any of TCG, TCA, TCT, or TCC; (iv) CTG may be replaced with any of CTT, CTC, TTG or TTA, and CTA may be replaced with any of CTT, CTC, TTG or TTA; or (v) TTG may be replaced with any of CTG, CTA, CTT or CTC, and TTA may be replaced with any of CTG, CTA, CTT or CTC.

[0161] Preferably, the defined replacement scheme is one or more of those listed in the table below:

| Codon 1 | | Codon 2 | |
|---|---|---|---|
| From | To | From | To |
| GCG | GCT | GCA | GCT |
| GCG | GCT | GCA | GCC |
| GCG | GCC | GCA | GCT |
| GCG | GCC | GCA | GCC |
| TCG | TCT | TCA | TCT |
| TCG | TCT | TCA | TCC |
| TCG | TCT | TCA | AGT |
| TCG | TCT | TCA | AGC |
| TCG | TCC | TCA | TCT |
| TCG | TCC | TCA | TCC |
| TCG | TCC | TCA | AGT |
| TCG | TCC | TCA | AGC |
| TCG | AGT | TCA | TCT |
| TCG | AGT | TCA | TCC |
| TCG | AGT | TCA | AGT |
| TCG | AGT | TCA | AGC |
| TCG | AGC | TCA | TCT |
| TCG | AGC | TCA | TCC |
| TCG | AGC | TCA | AGT |
| TCG | AGC | TCA | AGC |
| AGT | TCG | AGC | TCG |
| AGT | TCG | AGC | TCA |
| AGT | TCG | AGC | TCT |
| AGT | TCG | AGC | TCC |
| AGT | TCA | AGC | TCG |
| AGT | TCA | AGC | TCA |
| AGT | TCA | AGC | TCT |
| AGT | TCA | AGC | TCC |
| AGT | TCT | AGC | TCG |
| AGT | TCT | AGC | TCA |
| AGT | TCT | AGC | TCT |
| AGT | TCT | AGC | TCC |
| AGT | TCC | AGC | TCG |
| AGT | TCC | AGC | TCA |
| AGT | TCC | AGC | TCT |
| AGT | TCC | AGC | TCC |
| CTG | CTT | CTA | CTT |
| CTG | CTT | CTA | CTC |
| CTG | CTT | CTA | TTG |
| CTG | CTT | CTA | TTA |
| CTG | CTC | CTA | CTT |
| CTG | CTC | CTA | CTC |
| CTG | CTC | CTA | TTG |
| CTG | CTC | CTA | TTA |
| CTG | TTG | CTA | CTT |
| CTG | TTG | CTA | CTC |
| CTG | TTG | CTA | TTG |
| CTG | TTG | CTA | TTA |
| CTG | TTA | CTA | CTT |
| CTG | TTA | CTA | CTC |
| CTG | TTA | CTA | TTG |
| CTG | TTA | CTA | TTA |
| TTG | CTG | TTA | CTG |
| TTG | CTG | TTA | CTA |
| TTG | CTG | TTA | CTT |
| TTG | CTG | TTA | CTC |
| TTG | CTA | TTA | CTG |
| TTG | CTA | TTA | CTA |
| TTG | CTA | TTA | CTT |
| TTG | CTA | TTA | CTC |
| TTG | CTT | TTA | CTG |
| TTG | CTT | TTA | CTA |
| TTG | CTT | TTA | CTT |
| TTG | CTT | TTA | CTC |
| TTG | CTC | TTA | CTG |
| TTG | CTC | TTA | CTA |
| TTG | CTC | TTA | CTT |
| TTG | CTC | TTA | CTC |
| GCT | GCG | GCC | GCG |
| GCT | GCG | GCC | GCA |
| GCT | GCA | GCC | GCG |
| GCT | GCA | GCC | GCA |
| TCA | TCG | | |
| TCA | TCT | | |
| TCA | TCC | | |
| TCA | AGT | | |
| TCA | AGC | | |
| TCT | TCG | TCC | TCG |
| TCT | TCG | TCC | TCA |
| TCT | TCG | TCC | AGT |
| TCT | TCG | TCC | AGC |
| TCT | TCA | TCC | TCG |
| TCT | TCA | TCC | TCA |
| TCT | TCA | TCC | AGT |
| TCT | TCA | TCC | AGC |
| TCT | AGT | TCC | TCG |
| TCT | AGT | TCC | TCA |
| TCT | AGT | TCC | AGT |
| TCT | AGT | TCC | AGC |
| TCT | AGC | TCC | TCG |
| TCT | AGC | TCC | TCA |
| TCT | AGC | TCC | AGT |
| TCT | AGC | TCC | AGC |
| CTA | CTG | | |
| CTA | CTT | | |
| CTA | CTC | | |
| CTA | TTG | | |
| CTA | TTA | | |
| TTA | CTG | | |
| TTA | CTA | | |
| TTA | CTT | | |
| TTA | CTC | | |
| TTA | TTG | | |
| CTT | CTG | CTC | CTG |
| CTT | CTG | CTC | CTA |
| CTT | CTG | CTC | TTG |
| CTT | CTG | CTC | TTA |
| CTT | CTA | CTC | CTG |
| CTT | CTA | CTC | CTA |
| CTT | CTA | CTC | TTG |
| CTT | CTA | CTC | TTA |
| CTT | TTG | CTC | CTG |
| CTT | TTG | CTC | CTA |
| CTT | TTG | CTC | TTG |
| CTT | TTG | CTC | TTA |
| CTT | TTA | CTC | CTG |
| CTT | TTA | CTC | CTA |
| CTT | TTA | CTC | TTG |
| CTT | TTA | CTC | TTA |

[0162] Preferably, none of these codon replacements affect ribosomal binding sites (AGGAGG), which are highly conserved regulatory sequences in E. coli. The selected codon replacements may be tested on a small test region (e.g. a 20 kb region of the genome rich in both essential target genes and target codons) to assess viability. If the codon replacements are not viable on the small test region they may be disregarded.

[0163] When replacement of one or more sense codons in the parent genome with defined replacement synonymous sense codons does not result in a viable genome, alternative replacement synonymous sense codons may be used. For instance, 99.9% of the occurrences of one or more sense codons in the parent genome may be replaced with a defined (i.e. single) synonymous sense codon, and the remaining 0.1% with alternative synonymous sense codons. For example, 99.9% of the occurrences of TCG may be replaced with AGC and 0.1% replaced with TCT, TCC, AGT or AGC; and/or 99.9% of the occurrences of TCA may be replaced with AGT and 0.1% replaced with TCT, TCC, AGT or AGC.

[0164] As used herein, a “stop codon” is a nucleotide triplet that codes for termination of translation into proteins. Typically, genomes naturally comprise 3 stop codons: TAA (“ochre”), TGA (“opal” or “umber”) and TAG (“amber”).

[0165] In some embodiments the synthetic prokaryotic genome further comprises 10 or fewer, 5 or fewer, or no occurrences of one or two stop codons, preferably 10 or fewer, 5 or fewer, or no occurrences of the amber stop codon (TAG). Preferably wherein 90% or more, 95% or more, 98% or more, 99% or more, or all of the occurrences of TAG in the parent prokaryotic genome are replaced with TAA (the ochre stop codon). In preferred embodiments the synthetic prokaryotic genome comprises no occurrences of the amber stop codon (TAG), optionally wherein all of the occurrences of TAG in the parent prokaryotic genome are replaced with TAA (the ochre stop codon).

[0166] Accordingly, in preferred embodiments the synthetic prokaryotic genome of the present invention comprises no occurrences of one or more, or two or more sense codons and no occurrences of one stop codon, preferably the amber stop codon (TAG). In more preferred embodiments the synthetic prokaryotic genome of the present invention comprises no occurrences of two sense codons, preferably TCG and TCA, and no occurrences of the amber stop codon (TAG), optionally wherein TCG, TCA and TAG in the parent prokaryotic genome are replaced with synonymous codons, for example 99.9% or more of the occurrences of TCG in the parent prokaryotic genome are replaced with AGC, 99.9% or more of the occurrences of TCA in the parent prokaryotic genome are replaced with AGT and all of the occurrences of TAG in the parent prokaryotic genome are replaced with TAA.

[0167] In some embodiments the synthetic prokaryotic genome comprises a polynucleotide sequence which is at least 80%, 85%, 90%, 95%, 98%, 99%, 99.5%, 99.8%, or 99.9% identical to SEQ ID NO:1 or SEQ ID NO:2.

[0168] The invention provides a synthetic prokaryotic genome which is at least 98%, 98.5%, 99%, 99.5%, 99.6%, 99.7%, 99.8%, 99.9%, 99.95% or 100% identical to SEQ ID NO:1 or SEQ ID NO:2

[0169] Sequence comparisons can be conducted by eye, or more usually, with the aid of readily available sequence comparison programs. These publicly and commercially available computer programs can calculate sequence identity between two or more sequences.

[0170] Sequence identity may be calculated over contiguous sequences, i.e. one sequence is aligned with the other sequence and each amino acid in one sequence directly compared with the corresponding amino acid in the other sequence, one residue at a time. This is called an “ungapped” alignment. Typically, such ungapped alignments are performed only over a relatively short number of residues (for example less than 50 contiguous amino acids).

[0171] Although this is a very simple and consistent method, it fails to take into consideration that, for example, in an otherwise identical pair of sequences, one insertion or deletion will cause the following amino acid residues to be put out of alignment, thus potentially resulting in a large reduction in % homology when a global alignment is performed. Consequently, most sequence comparison methods are designed to produce optimal alignments that take into consideration possible insertions and deletions without penalising unduly the overall homology score. This is achieved by inserting “gaps” in the sequence alignment to try to maximise local homology.

[0172] However, these more complex methods assign “gap penalties” to each gap that occurs in the alignment so that, for the same number of identical amino acids, a sequence alignment with as few gaps as possible (reflecting higher relatedness between the two compared sequences) will achieve a higher score than one with many gaps. “Affine gap costs” are typically used that charge a relatively high cost for the existence of a gap and a smaller penalty for each subsequent residue in the gap. This is the most commonly used gap scoring system. High gap penalties will of course produce optimised alignments with fewer gaps. Most alignment programs allow the gap penalties to be modified. However, it is preferred to use the default values when using such software for sequence comparisons. For example when using the GCG Wisconsin Bestfit package (see below) the default gap penalty for amino acid sequences is −12 for a gap and −4 for each extension.

[0173] Calculation of maximum % sequence identity therefore firstly requires the production of an optimal alignment, taking into consideration gap penalties. A suitable computer program for carrying out such an alignment is the GCG Wisconsin Bestfit package (University of Wisconsin, U.S.A; Devereux et al., 1984, Nucleic Acids Research 12:387). Examples of other software than can perform sequence comparisons include, but are not limited to, the BLAST package (see Ausubel et al., 1999 ibid-Chapter 18), FASTA (Atschul et al., 1990, J. Mol. Biol., 403-410) and the GENEWORKS suite of comparison tools. Both BLAST and FASTA are available for offline and online searching (see Ausubel et al., 1999 ibid, pages 7-58 to 7-60). However it is preferred to use the GCG Bestfit program.

[0174] Suitably, the sequence identity may be determined across the entirety of the sequence. Suitably, the sequence identity may be determined across the entirety of the candidate sequence being compared to a sequence recited herein.

[0175] Although the final sequence identity can be measured in terms of identity, the alignment process itself is typically not based on an all-or-nothing pair comparison. Instead, a scaled similarity score matrix is generally used that assigns scores to each pairwise comparison based on chemical similarity or evolutionary distance. An example of such a matrix commonly used is the BLOSUM62 matrix (the default matrix for the BLAST suite of programs). GCG Wisconsin programs generally use either the public default values or a custom symbol comparison table if supplied (see user manual for further details). Preferably, the public default values for the GCG package, or in the case of other software the default matrix, such as BLOSUM62, are used.

[0176] Once the software has produced an optimal alignment, it is possible to calculate % sequence identity. The software typically does this as part of the sequence comparison and generates a numerical result.

[0177] Refactoring

[0178] Genomes contain numerous overlapping open reading frames (ORFs), which can be classified as 3′, 3′ (between ORFs in opposite orientations) or 5′, 3′ (between ORFs in the same orientation). The one or more sense codons (i.e. those to be replaced) may be found within both classes of overlap in the parent genome.

[0179] If the replacement of the one or more sense codons of each ORF within an overlap can be achieved without changing the encoded protein sequence of either ORF (i.e. by introducing synonymous codon(s)) then it may not be necessary to edit (e.g. refactor) the parent genome. However, when the encoded protein sequence is changed by the replacement of the one or more sense codons, (i.e. one or more synonymous sense codons are not introduced into one or both of the ORFs), then it may be necessary to edit (e.g. refactor) the parent genome.

[0180] Thus, in some embodiments one or more pairs of genes which share an overlapping region comprising the one or more sense codons in the parent genome are refactored. “Refactored” means that the genes are reorganised to prevent changes to the encoded protein sequences. Preferably, the pairs of genes are those in which sense codon replacements (e.g. defined synonymous codon replacements) would change the encoded protein sequence of both or either of the pair of genes. Most preferably, all pairs of genes which share an overlapping region comprising the one or more sense codons in the parent genome are refactored, wherein the pairs of genes are those in which sense codon replacements (e.g. defined synonymous codon replacements) would change the encoded protein sequence of both or either of the pair of genes.

[0181] For 3′,3′ overlaps (i.e. pairs of genes in opposite orientations) a synthetic insert may be inserted between the genes. For 3′,3′ overlaps the synthetic insert may comprise the overlapping region.

[0182] For 5′, 3′ overlaps (i.e. pairs of genes in the same orientation, comprising an upstream gene and a downstream gene) a synthetic insert may be inserted between the genes. For 5′, 3′ overlaps the synthetic insert may comprise: (i) a stop codon; (ii) about 20-200 bp, or 20-100 bp, or 20-50 bp, from upstream of the overlapping region; and (iii) the overlapping region. Preferably, the synthetic insert comprises: (i) a stop codon; (ii) about 20 bp from upstream of the overlapping region; and (iii) the overlapping region. This preserves the sequence of the RBS for the downstream ORF and the distance between this RBS and its start codon.

[0183] In preferred embodiments the stop codon is in frame with the original start site for the downstream gene. Preferably the stop codon is TAA.

[0184] Aside from the specific mutations described above, i.e. those aimed at reducing the amount of one or more sense codons (e.g. replacements of one or more sense codons and/or refactoring) and those aimed at reducing the amount of amber stop codons, the synthetic prokaryotic genome may comprise 1000 or fewer, 100 or fewer, 50 or fewer, 20 or fewer, 10 or fewer additional (i.e. non-programmed) mutations relative to the parent genome. Preferably the synthetic prokaryotic genome comprises 2×10⁻⁴ or fewer additional or non-rogrammed mutations per target codon (i.e. per occurrence of the one or more sense codons in the parent genome).

[0185] Polynucleotides

[0186] The invention provides polynucleotides comprising one or more genes with no occurrences of one or more sense codons. The polynucleotides may comprise two or more, three or more, four or more, five or more, ten or more, twenty or more, thirty or more, forty or more, fifty or more, 100 or more, 200 or more, 500 or more, 600 or more, 700 or more, 800 or more, 900 or more, 1000 or more, 1500 or more, or 2000 or more genes with no occurrences of one or more sense codons. Preferably, the polynucleotides comprise 100 or more genes with no occurrences of one or more sense codons. More preferably, the polynucleotides comprise 1000 or more genes with no occurrences of one or more sense codons.

[0187] The one or more sense codons may consist of one, two, three, four, five, six, seven, or eight sense codons. Preferably, the one or more sense codons consist of one sense codon or two sense codons, most preferably two sense codons. Thus, in preferred embodiments the polynucleotides comprise 100 or more genes with no occurrences of one or two sense codons. In other preferred embodiments the polynucleotides comprise 1000 or more genes with no occurrences of one or two sense codons.

[0188] The one or more sense codons may be selected from: TCG, TCA, AGT, AGC, GCG, GCA, GTG, GTA, CTG, CTA, TTG, TTA, ACG, ACA, CCG, CCA, CGG, CGA, CGT, CGC, AGG, AGA, GGG, GGA, GGT, GGC, ATT, and ATC. Alternatively, the one or more sense codons may be selected from: TCG, TCA, TCT, TCC, AGT, AGC, GCG, GCA, GCT, GCC, CTG, CTA, CTT, CTC, TTG, and TTA. Preferably, the one or more sense codons are selected from: TCG, TCA, AGT, AGC, GCG, GCA, CTG, CTA, TTG, and TTA. More preferably, the one of more sense codons are selected from TCG, TCA, TTG, TTA, GCG and GCA. Most preferably, the one of more sense codons are TCG and/or TCA.

[0189] The one or more sense codons in the genes may be replaced with synonymous sense codons. Preferably, the replacement is a defined replacement, i.e. one sense codon is replaced with a single synonymous sense codon.

[0190] For example GCG may be replaced with GCT or GCC; GCA may be replaced with GCT or GCC; TCG may be replaced with TCT, TCC, AGT, or AGC; TCA may be replaced with TCT, TCC, AGT, or AGC; AGT may be replaced with TCG, TCA, TCT, or TCC; AGC may be replaced with TCG, TCA, TCT, or TCC; CTG may be replaced with CTT, CTC, TTG or TTA; CTA may be replaced with CTT, CTC, TTG or TTA; TTG may be replaced with CTG, CTA, CTT or CTC; or TTA may be replaced with CTG, CTA, CTT or CTC. Preferably the one or more defined sense codon replacements are selected from: GCG to GCT or GCC; GCA to GCT or GCC; TCG to AGT or AGC; TCA to AGT or AGC; AGT to TCA or TCT; AGC to TCG or TCC or TCA; TTG to CTT; and TTA to CTC. More preferably, TCG and/or TCA are replaced with AGC and/or AGT. Most preferably, TCG are replaced with AGC and/or TCA are replaced with AGT.

[0191] In some embodiments the genes are those for which there is evidence of translation and/or of the predicted protein product.

[0192] In preferred embodiments the genes are essential genes. The essential genes may be selected from one ore more of the list consisting of: ribF, IspA, ispH, dapB, folA, imp, yabQ, ftsL, ftsl, murE, murF, mraY, murD, ftsW, murG, murC, ftsQ, ftsA, ftsZ, 1pxC, secM, secA, can, folK, hemL, yadR, dapD, map, rpsB, tsf, pyrH, frr, dxr, ispU, cdsA, yaeL, yaeT, IpxD, fabZ, IpxA, IpxB, dnaE, accA, tilS, proS, yafF, hemB, secD, secF, ribD, ribE, thiL, dxs, ispA, dnaX, adk, hemH, IpxH, cysS, folD, entD, mrdB, mrdA, nadD, holA, rIpB, leuS, Int, gInS, fldA, cydA, infA, cydC, ftsK, lolA, serS, rpsA, msbA, IpxK, kdsB, mukF, mukE, mukB, asnS, fabA, mviN, rne, fabD, fabG, acpP, tmk, holB, lolC, loID, IolE, purB, minE, minD, pth, prsA, ispE, loIB, hemA, prfA, prmC, kdsA, topA, ribA, fabl, tyrS, ribC, ydiL, pheT, pheS, rpbT, infC, thrS, nadE, gapA, yeaZ, aspS, argS, pgsA, yefM, metG, folE, yejM, gyrA, nrdA, nrdB, folC, accD, fabB, gltX, ligA, zipA, dapE, dapA, der, hisS, ispG, suhB, tadA, acpS, era, mc, lepB, rpoE, pssA, yfiO, rpIS, trmD, rpsP, ffh, grpE, csrA, ispF, ispD, ftsB, eno, pyrG, chpR, lgt, fbaA, pgk, yqgD, metK, yqgF, plsC, ygiT, parE, ribB, cca, ygjD, tdcF, yraL, yhbV, infB, nusA, ftsH, obgE, rpmA, rplU, ispB, murA, yrbB, yrbK, yhbN, rpsl, rpIM, degS, mreD, mreC, mreB, accB, accC, yrdC, def, fmt, rpIQ, rpoA, rpsD, rpsK, rpsM, secY, rpIO, rpmD, rpsE, rpIR, rpIF, rpsH, rpsN, rplE, rpIX, rpIN, rpsQ, rpmC, rpIP, rpsC, rpIV, rpsS, rpIB, rpIW, rpID, rpIC, rpsJ, fusA, rpsG, rpsL, trpS, yrfF, asd, rpoH, ftsX, ftsE, ftsY, yhhQ, bcsB, glyQ, gpsA, rfaK, kdtA, coaD, rpmB, dfp, dut, gmk, spoT, gyrB, dnaN, dnaA, rpmH, rnpA, yidC, tnaB, glmS, glmU, wzyE, hemD, hemC, yigP, ubiB, ubiD, hemG, yihA, ftsN, murl, murB, birA, secE, nusG, rpIJ, rpIL, rpoB, rpoC, ubiA, plsB, lexA, dnaB, ssb, alsK, groS, psd, orn, yjeE, rpsR, chpS, ppa, valS, yjgP, yjgQ, and dnaC.

[0193] Preferably, the essential genes may be selected from one ore more of the list consisting of: ribF, IspA, ispH, dapB, folA, imp, yabQ, IpxC, secM, secA, can, folk, hemL, yadR, dapD, map, rpsB, tsf, pyrH, frr, dxr, ispU, cdsA, yaeL, yaeT, IpxD, fabZ, IpxA, IpxB, dnaE, accA, tilS, proS, yafF, hemB, secD, secF, ribD, ribE, thiL, dxs, ispA, dnaX, adk, hemH, IpxH, cysS, folD, entD, mrdB, mrdA, nadD, holA, rIpB, leuS, Int, gInS, fldA, cydA, infA, cydC, ftsK, lolA, serS, rpsA, msbA, IpxK, kdsB, mukF, mukE, mukB, asnS, fabA, mviN, me, fabD, fabG, acpP, tmk, holB, loIC, loID, lolE, purB, minE, minD, pth, prsA, ispE, lolB, hemA, prfA, prmC, kdsA, topA, ribA, fabl, tyrS, ribC, ydiL, pheT, pheS, rpIT, infC, thrS, nadE, gapA, yeaZ, aspS, argS, pgsA, yefM, metG, folE, yejM, gyrA, nrdA, nrdB, folC, accD, fabB, gltX, ligA, zipA, dapE, dapA, der, hisS, ispG, suhB, tadA, acpS, era, mc, lepB, rpoE, pssA, yfiO, rp/S, trmD, rpsP, ffh, grpE, csrA, ispF, ispD, ftsB, eno, pyrG, chpR, Igt, fbaA, pgk, yqgD, metK, yqgF, plsC, ygiT, parE, ribB, cca, ygjD, tdcF, yraL, yhbV, infB, nusA, ftsH, obgE, rpmA, rplU, ispB, murA, yrbB, yrbK, yhbN, rpsl, rp/M, degS, mreD, mreC, mreB, accB, accC, yrdC, def, fmt, rplQ, rpoA, rpsD, rpsK, rpsM, secY, rpIO, rpmD, rpsE, rplR, rplF, rpsH, rpsN, rplE, rpIX, rplN, rpsQ, rpmC, rpIP, rpsC, rpIV, rpsS, rpIB, rpIW, rpID, rpIC, rpsJ, fusA, rpsG, rpsL, trpS, yrfF, asd, rpoH, ftsX, ftsE, ftsY, yhhQ, bcsB, glyQ, gpsA, rfaK, kdtA, coaD, rpmB, dfp, dut, gmk, spoT, gyrB, dnaN, dnaA, rpmH, mpA, yidC, tnaB, glmS, glmU, wzyE, hemD, hemC, yigP, ubiB, ubiD, hemG, yihA, ftsN, murl, murB, birA, secE, nusG, rpIJ, rpIL, rpoB, rpoC, ubiA, plsB, lexA, dnaB, ssb, alsK, groS, psd, om, yjeE, rpsR, chpS, ppa, valS, yjgP, yjgQ, and dnaC.

[0194] Accordingly, the invention provides polynucleotides comprising one or more essential genes with no TCG codons and/or TCA codons, wherein the one or more essential genes is selected from the list consisting of: ribF, IspA, ispH, dapB, folA, imp, yabQ, IpxC, secM, secA, can, folk, hemL, yadR, dapD, map, rpsB, tsf, pyrH, frr, dxr, ispU, cdsA, yaeL, yaeT, IpxD, fabZ, IpxA, IpxB, dnaE, accA, tilS, proS, yafF, hemB, secD, secF, ribD, ribE, thiL, dxs, ispA, dnaX, adk, hemH, IpxH, cysS, folD, entD, mrdB, mrdA, nadD, holA, rIpB, leuS, Int, gInS, fldA, cydA, infA, cydC, ftsK, lolA, serS, rpsA, msbA, IpxK, kdsB, mukF, mukE, mukB, asnS, fabA, mviN, me, fabD, fabG, acpP, tmk, holB, loIC, loID, IolE, purB, minE, minD, pth, prsA, ispE, IolB, hemA, prfA, prmC, kdsA, topA, ribA, fabl, tyrS, ribC, ydiL, pheT, pheS, rplT, infC, thrS, nadE, gapA, yeaZ, aspS, argS, pgsA, yefM, metG, folE, yejM, gyrA, nrdA, nrdB, folC, accD, fabB, gltX, ligA, zipA, dapE, dapA, der, hisS, ispG, suhB, tadA, acpS, era, mc, lepB, rpoE, pssA, yfiO, rp/S, trmD, rpsP, ffh, grpE, csrA, ispF, ispD, ftsB, eno, pyrG, chpR, Igt, fbaA, pgk, yqgD, metK, yqgF, plsC, ygiT, parE, ribB, cca, ygjD, tdcF, yraL, yhbV, infB, nusA, ftsH, obgE, rpmA, rplU, ispB, murA, yrbB, yrbK, yhbN, rpsl, rp/M, degS, mreD, mreC, mreB, accB, accC, yrdC, def, fmt, rplQ, rpoA, rpsD, rpsK, rpsM, secY, rplO, rpmD, rpsE, rplR, rplF, rpsH, rpsN, rplE, rplX, rplN, rpsQ, rpmC, rplP, rpsC, rplV, rpsS, rplB, rplW, rplD, rp/C, rpsJ, fusA, rpsG, rpsL, trpS, yrfF, asd, rpoH, ftsX, ftsE, ftsY, yhhQ, bcsB, glyQ, gpsA, rfaK, kdtA, coaD, rpmB, dfp, dut, gmk, spoT, gyrB, dnaN, dnaA, rpmH, rnpA, yidC, tnaB, glmS, glmU, wzyE, hemD, hemC, yigP, ubiB, ubiD, hemG, yihA, ftsN, murl, murB, birA, secE, nusG, rpIJ, rp/L, rpoB, rpoC, ubiA, plsB, lexA, dnaB, ssb, alsK, groS, psd, orm, yjeE, rpsR, chpS, ppa, valS, yjgP, yjgQ, and dnaC. Preferably, the polynucleotides comprise two or more, three or more, four or more, five or more, ten or more, twenty or more, thirty or more, forty or more, fifty or more, 100 or more, or 200 or more essential genes with no TCG codons and/or TCA codons.

[0195] In some embodiments the polynucleotide comprises a polynucleotide sequence which is at least 80%, 85%, 90%, 95%, 98%, 99%, 99.5%, 99.8%, or 99.9%, or 100% identical to SEQ ID NO:1 or SEQ ID NO:2 or to any fragment of SEQ ID NO:1 or SEQ ID NO:2, preferably wherein the fragment is at least 10 kb, 20 kb, 50 kb, 100 kb, or 500 kb in length.

[0196] Preferably the polynucleotide is viable. I.e. the polynucleotide may incorporated into a genome such that the genome is a viable genome. Preferably, the polynucleotide may replace a corresponding region of the parent genome and retain viability of said genome. As used herein, a “viable genome” refers to a genome that contains nucleic acid sequences sufficient to cause and/or sustain viability of a cell, e.g., those encoding molecules required for replication, transcription, translation, energy production, transport, production of membranes and cytoplasmic components, and cell division. Thus, the present invention also provides a viable synthetic prokaryotic genome (e.g. a viable synthetic E. coli genome) comprising the polynucleotide of the present invention.

[0197] The invention provides a polynucleotide which is at least 98%, 98.5%, 99%, 99.5%, 99.6%, 99.7%, 99.8%, 99.9%, 99.95% or 100% identical to SEQ ID NO:1 or SEQ ID NO:2 or to any fragment of SEQ ID NO:1 or SEQ ID NO:2, preferably wherein the fragment is at least 10 kb, 20 kb, 50 kb, 100 kb, or 500 kb in length.

[0198] Host Cells and uses Thereof

[0199] Host Cells

[0200] The invention also provides a host cell comprising the synthetic prokaryotic genome or the polynucleotide of the invention. The host cell may be an isolated host cell.

[0201] The host cell of the present invention is a prokaryotic cell. More preferably, the host cell is a bacterial cell. Preferably the bacterial host cell is suitable for heterologous protein production, in particular the production of polypeptides comprising one or more non-proteinogenic amino acids (for instance those described by Ferrer-Miralles, N. and Villaverde, A., 2013. Microbial Cell Factories, 12:113). Suitable bacterial host cells include: escherichia (e.g. Escherichia coil), caulobacteria (e.g. Caulobacter crescentus), phototrophic bacteria (e.g. Rodhobacter sphaeroides), cold adapted bacteria (e.g. Pseudoalteromonas haloplanktis, Shewanella sp. strain Ac10), pseudomonads (e.g. Pseudomonas fluorescens, Pseudomonas putida, Pseudomonas aeruginosa), halophilic bacteria (e.g. Halomonas elongate, Chromohalobacter salexigens), streptomycetes (e.g. Streptomyces lividans, Streptomyces griseus), nocardia (e.g. Nocardia lactamdurans), mycobacteria (e.g. Mycobacterium smegmatis), coryneform bacteria (e.g. Corynebacterium glutamicum, Corynebacterium ammoniagenes, Brevibacterium lactofermentum), bacilli (e.g. Bacillus subtilis, Bacillus brevis, Bacillus megaterium, Bacillus licheniformis, Bacillus amyloliquefaciens), and lactic acid bacteria (e.g. Lactococcus lactis, Lactobacillus plantarum, Lactobacillus casei, Lactobacillus reuteri, Lactobacillus gassen). In some embodiments the bacterial host cell is gram-negative bacterium.

[0202] Preferably, the host cell is an Escherichia coli, Salmonella enterica, or Shigella dysenteriae. More preferably, the host cell is an E. coli. Suitable E. coli host cells include MDS42, K-12, MG1655, BL21, BL21(DE3), AD494, Origami, HMS174, BLR(DE3), HMS174(DE3), Tuner(DE3), Origami2(DE3), Rosetta2(DE3), Lemo21(DE3), NiCo21(DE3), T7 Express, SHuffle Express, C41(DE3), C43(DE3), and m15 pREP4 or derivatives thereof (Rosano, G. L. and Ceccarelli, E. A., 2014. Frontiers in microbiology, 5, p.172). Most preferably, the host cell is MDS42, MG1655, or BL21 or a derivative thereof. MG1655 is considered as the wild type strain of E coli. The GenBank ID of genomic sequence of this strain is U00096. BL21 is widely available commercially. For example, it can be purchased from New England BioLabs with catalog number C2530H.

[0203] The host cell may preferably be the same as that from which the synthetic prokaryotic genome or polynucleotide is from (or derived from). For example, if the synthetic prokaryotic genome is a synthetic E. coli genome then the host cell is preferably an E. coli. When the parent genome of a cell has been modified to produce the synthetic prokaryotic genome of the present invention, the host cell is preferably the same cell, i.e. preferably the host cell comprising the synthetic prokaryotic genome is the same as the host cell of the parent genome (the parent host cell).

[0204] The host cell may be viable, i.e. able to grow and replicate.

[0205] When the genome of a cell has been modified to produce the synthetic prokaryotic genome of the present invention, the synthetic prokaryotic genome is preferably one which, when present in the parent host cell, does not substantially decrease the growth rate. Thus, preferably the host cell comprising the synthetic prokaryotic genome does not have a substantially decreased growth rate relative to the host cell comprising the parent genome. In some embodiments the host cell comprising the synthetic prokaryotic genome has a doubling time less than 4 times, 3 times, 2 times, or about 1.6 times, slower than the host cell comprising the host cell comprising the parent genome. The doubling time can be determined by any method known to those of skill in the art. In some embodiments the doubling time is determined at 37° C., 25° C. or 42° C., in LB media.

[0206] When the genome of a cell has been modified to produce the synthetic prokaryotic genome of the present invention, the synthetic prokaryotic genome is preferably one which, when present in the parent host cell, does not cause any substantial phenotypical changes. Thus, preferably the host cell comprising the synthetic prokaryotic genome does not have any substantial phenotypical changes relative to the host cell comprising the parent genome. In some embodiments the host cell comprising the synthetic prokaryotic genome has a mean cell length less than 100%, 50%, or about 20% greater than the host cell comprising the parent genome. For example, the cell length may be about 1.5 to 3 microns. The cell length can be determined by any method known to those of skill in the art. In some embodiments the host cell comprising the synthetic prokaryotic genome has a proteome that is not substantially different from the proteome of the host cell comprising the parent genome. The proteome can be determined by any method known to those of skill in the art.

[0207] Reassignment to Alternative Canonical Amino Acids

[0208] In some embodiments the one or more sense codons (i.e. those removed from the parent genome) are reassigned to encode alternative canonical amino acids. For example, if TCG and TCA have been removed, one or both may be reassigned to encode a canonical amino acid other than serine (e.g. alanine).

[0209] For instance, the synthetic prokaryotic genome of the present invention substantially or completely lacks one or more sense codons. Therefore, one or more tRNA or release factors may be deleted from the synthetic genome. For instance, a tRNA which decodes the one or more sense codons that have been replaced (or deleted) may be deleted from the synthetic prokaryotic genome. A tRNA which decodes one or more sense codons that have been replaced (or deleted) may be deleted and the synthetic prokaryotic genome will remain viable if the tRNA decodes only the one or more sense codons that have been replaced (or deleted); or alternatively if the tRNA decodes one or more sense codons that have been replaced (or deleted) and one or more sense codons that have not been replaced (or deleted), if the tRNA is dispensable for the one or more sense codons that have not been replaced (or deleted) (i.e. the one or remaining sense codons which the tRNA decodes are decoded by one or more alternative tRNAs). For example, if the synthetic prokaryotic genome lacks TCA sense codons, serT, encoding tRNA^{Ser}UGA, may be deleted and/or if the synthetic prokaryotic genome lacks TCG sense codons, serU, encoding tRNA^{Ser}CGA, may be deleted. The deletion of one or more tRNAs may be used, for instance, in combination with a reassigned, endogenous tRNA or an orthogonal aminoacyl-tRNA synthetase/tRNA pair to reassign the one or more sense codons to an alternative amino acid.

[0210] For example, if TCG and TCA have been removed from the synthetic prokaryotic genome, serT, encoding tRNA^{Ser}UGA, and serU, encoding tRNA^{Ser}CGA, may be deleted from the synthetic prokaryotic genome, and either the tRNA_{CGA} can be reassigned (e.g. to tRNA^{Ala}_{CGA}) an orthogonal aminoacyl-tRNA synthetase/tRNA_{CGA} pair may be introduced to the host cell (e.g. by a heterologous nucleic acid or by incorporation into the synthetic prokaryotic genome) to reassign TCG to an alternative canonical amino acid. Thus, in some embodiments, the host cell of the present invention further comprises one or more reassigned tRNAs and/or one or more heterologous nucleotides (e.g. plasmids) encoding one orthogonal aminoacyl-tRNA synthetase (aaRS)-tRNA pair. In some embodiments the host cell of the present invention further comprises a plasmid encoding an orthogonal aminoacyl-tRNA synthetase (aaRS)-tRNA pair. Alternatively, the orthogonal aminoacyl-tRNA synthetase (aaRS)-tRNA pair may be introduced into the host cell by incorporation into the synthetic prokaryotic genome. Thus, in some embodiments the synthetic prokaryotic genome encodes an orthogonal aminoacyl-tRNA synthetase (aaRS)-tRNA pair, preferably wherein the gene encoding the native tRNA has been deleted from the parent prokaryotic genome. In preferred embodiments the host cell of the present invention further comprises one or more reassigned tRNAs. Methods for reassigning tRNAs will be well known to those of skill in the art.

[0211] The reassignment to encode alternative canonical amino acids may increase biosafety. Thus, in some embodiments the host cell of the present invention has increased biosafety. Accordingly, the present invention provides host cells with improved biosafety.

[0212] For example, the reassignment to encode alternative canonical amino acids may render the host cell comprising the synthetic prokaryotic genome resistant to bacteriophage infection. One or more bacteriophage genes will typically comprise the one or more sense codons, thus when the one or more bacteriophage genes are translated an alternative canonical amino acid may be incorporated into the corresponding bacteriophage proteins. The incorporation of an alternative canonical amino acid may destabilise, disrupt or reduce the activity of said proteins, thus reducing the infectivity of the bacteriophage and rendering the host cell resistant to bacteriophage infection.

[0213] Thus, in some embodiments the host cell of the present invention is resistant to phage infection. For example, when the genome of a cell has been modified to produce the synthetic prokaryotic genome of the present invention, the synthetic prokaryotic genome may be one which, when present in the parent host cell, increases resistance to phage infection. Thus, in some embodiments the host cell comprising the synthetic prokaryotic genome has increased phage resistance relative to the host cell comprising the parent genome.

[0214] Accordingly, the present invention provides phage-resistant host cells and host cells with increased phage resistance.

[0215] The reassignment to encode alternative canonical amino acids may also allow genetic material, e.g. antibiotic resistance genes, to be designed such that they are functional in the recoded strain, but not in wild type strains. For example, the genetic material may be incorporated into the host cell of the present invention (e.g. by a heterologous nucleic acid or by incorporation into the synthetic prokaryotic genome) such that the host cell will grow in certain conditions (e.g. in the presence of an antibiotic), but other host cells (e.g. the parent host cell) will not. Thus, in some embodiments the host cell of the present invention may render a composition comprising the host cell more resistant to contamination by other host cells (e.g. other prokaryotes).

[0216] Reassignment to Non-Proteinogenic Amino Acids

[0217] In some embodiments the one or more sense codons (i.e. those removed from the parent genome) are reassigned to encode non-canonical amino acids (non-proteinogenic amino acids).

[0218] Thus, the present invention provides for use of a host cell according to the present invention for producing polypeptides comprising one or more non-proteinogenic amino acids, preferably two or more non-proteinogenic amino acids, most preferably three or more non-proteinogenic amino acids.

[0219] The present invention also provides polypeptides obtained or obtainable by using a host cell according to the present invention. In some embodiments, the polypeptides comprise one or more non-proteinogenic amino acids, preferably two or more non-proteinogenic amino acids, most preferably three or more non-proteinogenic amino acids. Thus, the present invention also provides polypeptides comprising two or more non-proteinogenic amino acids and polypeptides comprising three or more non-proteinogenic amino acids.

[0220] As used herein, “non-proteinogenic amino acids” (also known as “non-coded amino acids” or “noncanonical amino acids”) are amino acids that are not naturally encoded or found in the genetic code. Despite the use of only 22 amino acids by the translational machinery to assemble proteins (the proteinogenic amino acids—20 in the standard genetic code and an additional 2 that can be incorporated by special translation mechanisms), over 140 amino acids are known to occur naturally in proteins and thousands more may occur in nature or be synthesized in the laboratory. Thus, non-proteinogenic amino acids may comprise any amino acid excluding L-alanine, L-cysteine, L-aspartic acid, L-glutamic acid, L-phenylalanine, glycine, L-histidine, L-isoleucine, L-lysine, L-leucine, L-methionine, L-asparagine, L-proline, L-glutamine, L-arginine, L-serine, L-threonine, L-valine, L-tryptophan and L-tyrosine, and optionally L-pyrrolysine and L-selenocysteine.

[0221] In some embodiments, the non-proteinogenic amino acids are unnatural amino acids (UAAs).

[0222] The non-proteinogenic amino acid or UAA is not particularly limited. Suitable non-proteinogenic amino acid and UAAs will be well known to those of skill in the art, for example those disclosed in Neumann, H., 2012. FEBS letters, 586(15), pp.2057-2064; and Liu, C.C. and Schultz, P. G., 2010. Annual review of biochemistry, 79, pp.413-444. In some embodiments the non-proteinogenic amino acid and/or UAAs are selected from one or more of: p-Acetylphenylalanine, m-Acetylphenylalanine, O-allyltyrosine, Phenylselenocysteine, p-Propargyloxyphenylalanine, p-Azidophenylalanine, p-Boronophenylalanine, O-methyltyrosine, p-Aminophenylalanine, p-Cyanophenylalanine, m-Cyanophenylalanine, p-Fluorophenylalanine, p-lodophenylalanine, p-Bromophenylalanine, p-Nitrophenylalanine, L-DOPA, 3-Aminotyrosine, 3-Iodotyrosine, p-lsopropylphenylalanine, 3-(2-Naphthyl)alanine, Biphenylalanine, Homoglutamine, D-tyrosine, p-Hydroxyphenyllactic acid, 2-Aminocaprylic acid, Bipyridylalanine, HQ-alanine, p-Benzoylphenylalanine, o-Nitrobenzylcysteine, o-Nitrobenzylserine, 4,5-Dimethoxy-2-nitrobenzylserine, o-N itrobenzyllysine, o-Nitrobenzyltyrosine, 2-Nitrophenylalanine, Dansylalanine, p-Carboxymethylphenylalanine, 3-Nitrotyrosine, Sulfotyrosine, Acetyllysine, Methylhistidine, 2-Aminononanoic acid, 2-Aminodecanoic acid, Pyrrolysine, Cbz-lysine, Boc-lysine and Allyloxycarbonyllysine.

[0223] Prokaryotes, e.g. E. coli, are not typically able to incorporate most eukaryotic post-translational modifications, such as ubiquitination, glycosylation and phosphorylation, nor are they typically capable of other eukaryotic maturation processes, and proteolytic protein maturation. In addition, correct disulphide bond formation and lipolysaccharide contaminations can be troublesome (see Ovaa, H., 2014. Frontiers in chemistry, 2, p.15). However, therapeutic proteins, such as antibodies, enzymes and cytokines commonly carry post-translational modifications and disulphide bonds, and often require proteolytic maturation to attain their correctly folded state. Thus, the majority of therapeutic proteins are produced in eukaryotic and mammalian cell systems. However, expression in prokaryotic host cells e.g. E. coli is in general cheaper, more susceptible to genetic modifications, and versatile with regard to mutant library development, and suitable for industrial scale fermentation (Ovaa, H., 2014. Frontiers in chemistry, 2, p.15).

[0224] Thus, in some embodiments the polypeptides are therapeutic polypeptides, preferably wherein mammalian protein modifications have been introduced via one or more non-proteinogenic amino acids. For example, amber codon suppression has previously been used to incorporate one or more non-proteinogenic amino acids (i.e. mammalian protein modifications) into therapeutic polypeptides. The present invention allows two or more non-proteinogenic amino acids to be incorporated. Thus, the present invention provides a therapeutic polypeptide comprising two or more non-proteinogenic amino acids.

[0225] The synthetic prokaryotic genome of the present invention substantially or completely lacks one or more sense codons, therefore one or more tRNA or release factors may be deleted from the synthetic genome. For example, a tRNA which decodes only the one or more sense codons that have been replaced (or deleted) may be deleted from the synthetic prokaryotic genome. For example, if the synthetic prokaryotic genome lacks TCA sense codons, serT, encoding tRNA^{Ser}_{UGA}, may be deleted and/or if the synthetic prokaryotic genome lacks TCG sense codons, serU, encoding tRNA^{Ser}_{CGA}, may be deleted. The synthetic prokaryotic genome may then be used (in conjunction with an orthogonal aminoacyl-tRNA synthetase-tRNA pair) to direct the incorporation of non-proteinogenic amino acids into proteins.

[0226] Genetic code expansion uses an orthogonal aminoacyl-tRNA synthetase (aaRS)-tRNA pair to direct the incorporation of non-proteinogenic amino acids into proteins, in response to an unassigned codon (e.g. the amber stop codon, UAG) introduced at the desired site in a gene of interest. The orthogonal synthetase does not recognize endogenous tRNAs, and specifically aminoacylates an orthogonal cognate tRNA (which is not an efficient substrate for endogenous synthetases) with the non-proteinogenic amino acids provided to (or synthesized by) the cell (Chin, J. W., 2017. Nature, 550(7674), 53-60). The person skilled in the art would be able to identify and/or generate suitable orthogonal aminoacyl-tRNA synthetase (aaRS)-tRNA pairs (e.g. Elliott, T. S. et al., 2014. Nat Biotechnol 32, 465-472; Elliott, T. S., et al., 2016. Cell Chem Biol 23, 805-815; and Krogager, T. P. et al., 2018. Nat Biotechnol 36, 156-159). Thus, in some embodiments, the host cell of the present invention further comprises one or more heterologous nucleotides (e.g. plasmids) encoding one orthogonal aminoacyl-tRNA synthetase (aaRS)-tRNA pair. In preferred embodiments the host cell of the present invention further comprises a plasmid encoding an orthogonal aminoacyl-tRNA synthetase (aaRS)-tRNA pair. Alternatively, the orthogonal aminoacyl-tRNA synthetase (aaRS)-tRNA pair may be introduced into the host cell by incorporation into the synthetic prokaryotic genome. Thus, in some embodiments the synthetic prokaryotic genome encodes an orthogonal aminoacyl-tRNA synthetase (aaRS)-tRNA pair, preferably wherein the gene encoding the native tRNA has been deleted from the parent prokaryotic genome.

[0227] Thus, in some embodiments the host cell of the present invention further comprises one or more heterologous nucleotides (e.g. plasmids) which comprise one or more genes comprising said sense codons. In preferred embodiments the host cell further comprises a plasmid comprising a gene comprising said sense codons. The one or more sense codons may be present in a desired site in the gene, preferably wherein the desired site allows incorporation of one or more non-proteinogenic amino acids (i.e. mammalian protein modifications) into polypeptides, preferably therapeutic polypeptides.

[0228] In other embodiments said sense codons may be present in one or more genes in the synthetic prokaryotic genome (for example, the heterologous nucleotide may be incorporated into the synthetic prokaryotic genome). The one or more sense codons may be present in a desired site in the gene, preferably wherein the desired site allows incorporation of one or more non-proteinogenic amino acids (i.e. mammalian protein modifications) into polypeptides, preferably therapeutic polypeptides.

[0229] For example, if TCG and TCA have been removed from the synthetic prokaryotic genome, serT, encoding tRNA^{Ser}_{UGA}, and serU, encoding tRNA^{Ser}_{CGA}, may be deleted from the synthetic prokaryotic genome, and an orthogonal aminoacyl-tRNA synthetase/tRNA_{CGA} pair may be used in combination with (heterologous) genes comprising the TCG codon, to encode polypeptides comprising one or more non-proteinogenic amino acid. Thus, the host cell of the present invention may, for instance, further comprise: (i) a plasmid encoding an orthogonal aminoacyl-tRNA synthetase/tRNA_{CGA} pair; and (ii) a plasmid comprising a gene comprising one or more TCG codons. Similarly, if AGT and AGC are removed, serV, encoding tRNA^{Ser}_{GCU} may be deleted from the synthetic prokaryotic genome, and an orthogonal aminoacyl-tRNA synthetase/tRNA_{ACU} pair and/or an orthogonal aminoacyl-tRNA synthetase/tRNA_{GCU} pair may be used. Similarly, if CTG and CTA are removed, leuP,Q,T,V encoding tRNA^{Leu}_{CAG}, and leuW, encoding tRNA^{Leu}_{UAG}, may be deleted from the synthetic prokaryotic genome, and an orthogonal aminoacyl-tRNA synthetase/tRNA_{CAG} pair may be used. Similarly, if TTG and TTA are removed, leuX, encoding tRNA^{Leu}_{CAA}, and leuZ, encoding tRNA^{Leu}_{UAA}, may be deleted from the synthetic prokaryotic genome, and an orthogonal aminoacyl-tRNA synthetase/tRNA_{CAA} pair and/or an orthogonal aminoacyl-tRNA synthetase/tRNA_{UAA} pair may be used may be used. Similarly, if GCG and GCA are removed, alaT,U,V, encoding tRNA^{Ala}_{UGC} may be deleted from the synthetic prokaryotic genome, and an orthogonal aminoacyl-tRNA synthetase/tRNA_{CGC} pair may be used.

[0230] In some embodiments the synthetic prokaryotic genome lacks genes encoding release factors (e.g. RF1) and/or the host cell lacks release factors (e.g. RF1) to increase the efficiency of incorporation of non-proteinogenic amino acids.

[0231] Method for Producing a Synthetic Genome

[0232] In one aspect, the invention provides a method for producing a synthetic genome comprising:
[0233] (a) providing a parent genome;
[0234] (b) carrying out one or more rounds of recombination-mediated genetic engineering on the parent genome, to produce two or more different partially synthetic genomes; and
[0235] (c) carrying out one or more rounds of directed conjugation with the two or more different partially synthetic genomes to produce a synthetic genome.

[0236] Recombination-Mediated Genetic Engineering

[0237] Preferably one or more rounds of recombination-mediated genetic engineering are used to edit 10-1000 kb, 50-1000 kb, 100-1000 kb, or 100-500 kb of the parent genome to provide two or more different partially synthetic genomes. Thus, in preferred embodiments each round of recombination-mediated genetic engineering inserts or replaces 10 kb or more, 50 kb or more, 100 kb or more, or about 100 kb of DNA in the parent genome.

[0238] As used herein, the term “recombination-mediated genetic engineering” (also known as “recombineering”) is a method for genetic engineering (i.e. editing genomes) based on homologous recombination systems. Typically recombineering is based on homologous recombination in Escherichia coli mediated by bacteriophage proteins, either RecE/RecT from Rac prophage or Redαβδ from bacteriophage lambda. Any suitable method of recombination-mediated genetic engineering may be used. Methods for recombination-mediated genetic engineering will be well known to those of skill in the art.

[0239] In “classical recombination” (exemplified by lambda red mediated recombination in E. coil), short regions of synthetic DNA may be inserted into the genome or used to replace genomic DNA in a two-step process: i) transformation of cells with linear double stranded DNA (dsDNA) carrying a stretch of synthetic DNA, coupled with a positive selection marker, and flanked by a homology region (HR) to the target region of the genome on each end, and ii) recombination mediated by the homologous regions, followed by selection for genomic integration by virtue of the positive selection marker. This approach can be used to insert or replace 2-3 kb of genomic DNA. Thus, if classical recombination is used, many rounds of recombination-mediated genetic engineering would be required to edit 100-500 kb of the parent genome.

[0240] Thus, in preferred embodiments the one or more rounds of recombination-mediated genetic engineering comprise one or more rounds of replicon excision for enhanced genome engineering through programmed recombination (REXER).

[0241] REXER is described in WO 2018/020248 (herein incorporated by reference). Each round of REXER may be used to insert or replace about 50 kb to 250 kb, or about 100 kb of DNA in the parent genome.

[0242] Thus, the one or more rounds of recombination-mediated genetic engineering may comprise:
[0243] i) providing a host cell (e.g. E. coil), wherein the host cell comprises an episomal replicon (e.g. a plasmid or a bacterial artificial chromosome) and a target nucleic acid (e.g. the genome), wherein the episomal replicon comprises a donor nucleic acid sequence (i.e. a synthetic region), wherein the donor nucleic acid sequence comprises in order: 5′—homologous recombination sequence 1—sequence of interest—homologous recombination sequence 2—3′, wherein the sequence of interest comprises a positive selectable marker, and wherein the target nucleic acid comprises in order: 5′—homologous recombination sequence 1—negative selectable marker—homologous recombination sequence 2—3′;
[0244] ii) providing helper protein(s) capable of supporting nucleic acid recombination in said host cell (e.g. lambda Red proteins);
[0245] iii) providing helper protein(s) and/or RNAs capable of supporting nucleic acid excision in said host cell (e.g. CRISPR/ Cas9 proteins/ RNAs);
[0246] iv) inducing excision of said donor nucleic acid sequence;
[0247] v) incubating to allow recombination between the excised donor nucleic acid and said target nucleic acid; and
[0248] vi) selecting for recombinants having incorporated said donor nucleic acid into said target nucleic acid.

[0249] Suitably selecting for recombinants having incorporated said donor nucleic acid into said target nucleic acid comprises selection for gain of the positive selectable marker of the donor nucleic acid and loss of the negative selectable marker of the target nucleic acid. Suitably selection for gain of the positive selectable marker of the donor nucleic acid and loss of the negative selectable marker of the target nucleic acid is carried out simultaneously. Suitably said sequence of interest comprises both a positive selectable marker and a negative selectable marker. Suitably the negative selectable marker is selected from the group consisting of sacB (sucrose sensitivity), rpsL (S12 ribosomal protein—streptomycin sensitivity), or phe^{ST251A_A294G} (4-chlorophenylalanine sensitivity). Suitably the positive selectable marker is selected from the group consisting of Cm^{R} (chloramphenicol resistance), Kan^{R} (kanamycin resistance), Hyg^{R} (hygromycin resistance), Gentamycin^{R} (gentamycin resistance), or tetracycline^{R} (tetracycline resistance). Suitably the step of selecting for recombinants comprises sequential selection for said positive and negative markers, or sequential selection for said negative and positive markers. Suitably the step of selecting for recombinants comprises simultaneous selection for said positive and negative markers.

[0250] Suitably said method as described above further comprises the step of inducing at least one double stranded break in the target nucleic acid sequence, wherein said double stranded break is between said homologous recombination sequence 1 and said homologous recombination sequence 2. Suitably at least two double stranded breaks are induced in the target nucleic acid sequence, wherein each said double stranded break is between said homologous recombination sequence 1 and said homologous recombination sequence 2.

[0251] Suitably said excised donor nucleic acid begins with said homologous recombination sequence 1 and ends with said homologous recombination sequence 2.

[0252] Suitably said episomal replicon comprises a negative selectable marker independent of the donor nucleic acid sequence. Suitably said method comprises the further step of selecting for loss of the episomal replicon by selecting for loss of said negative selectable marker independent of the donor nucleic acid sequence. Suitably said episomal replicon comprises in order: excision cut site 1—donor nucleic acid sequence—excision cut site 2. Suitably said target nucleic acid possesses its own origin of replication capable of functioning within said host cell. Suitably said episomal replicon is a plasmid nucleic acid. Suitably said episomal replicon is a bacterial artificial chromosome (BAC). Suitably said target nucleic acid is the host cell genome.

[0253] The episomal replicon (e.g. BAC) may be assembled by homologous recombination, for example in S. cerevisiae, as described in Kouprina, N., et al., 2004. Methods Mol Biol 255, 69-89. The assembly may combine: 7-14 stretches of synthetic DNA, each 6-13 kb in length; a selection construct (comprising a negative selection marker and/or a positive selection marker); and a BAC shuttle vector backbone. The stretches of synthetic DNA may collectively correspond to the donor nucleic acid sequence (i.e. the synthetic region) in the episomal replicon, wherein each stretch comprises 80-200 bp of overlapping DNA sequence with each other, and wherein the overlap regions are free of any recoding targets. The stretches may be supplied in pSC101 or pST vectors flanked by suitable restriction sites (e.g. Bsal, AvrII, Spel, or Xbal). Thus, during assembly the synthetic DNA stretches may be excised by digestion with the corresponding restriction enzymes. Assembly of the episomal replicon may be verified by sequencing.

[0254] Suitably the two homology regions may be 30-100 bp, or 40-50 bp, or about 50 bp in length.

[0255] CRISPR/Cas9 machinery may be used to for excision. In some embodiments the CRISPR/Cas9 machinery comprises Cas9, tracrRNA and two spacer RNAs, wherein the spacer RNAs target the two homology regions for excision. In preferred embodiments, the spacer RNAs are linear double stranded spacers. In other embodiments, the CRISPR/Cas9 machinery comprises Cas9 and two sgRNAs, wherein the sgRNAs target the two homology regions for excision.

[0256] Lambda red recombination machinery may be used for recombination. The lambda red recombination machinery may comprise lambda alpha/beta/gamma.

[0257] The method may comprise performing one or more rounds of REXER, i.e. the steps as described above with a first donor nucleic acid sequence, choosing further donor sequence(s) contiguous with said first donor nucleic acid sequence, and repeating said steps with said further donor nucleic acid sequence(s) until the partially synthetic genome has been assembled. This is known as genome stepwise interchange synthesis (GENESIS), described in Wang, K. et al., 2016. Nature 539, 59-64 and is shown schematically in FIG. 4.

[0258] In preferred embodiments the donor sequence(s) correspond to regions of the synthetic genome according to the present invention and/or to polynucleotides according to the present invention.

[0259] Thus, the donor sequence(s) (i.e. synthetic region) may comprise 20 or fewer occurrences of one or more sense codons; and/or the donor sequence(s) may comprise 10 or more, 20 or more, or 100 or more genes with no occurrences of one or more sense codons.

[0260] The donor sequence(s) (i.e. synthetic region) may be identical to sequences (i.e. non-synthetic regions) of the parent genome except that they have 50 or fewer, 20 or fewer, 10 or fewer, 5 or fewer, or 0 occurrences of each of one or more sense codons; and/or comprise less than 10%, 5%, 2%, 1%, 0.5%, 0.1% of the occurrences of each of one or more sense codons, relative to the corresponding region in the parent genome; and/or comprise 10 or more, 20 or more, or 100 or more genes with no occurrences of one or more sense codons.

[0261] The donor sequence(s) (i.e. synthetic region) may also be refactored relative to the sequences (i.e. non-synthetic regions) of the parent genome. For 3′,3′ overlaps (i.e. pairs of genes in opposite orientations) a synthetic insert may be inserted between the genes. For 3′, 3′ overlaps the synthetic insert may comprise the overlapping region. For 5′, 3′ overlaps (i.e. pairs of genes in the same orientation) a synthetic insert may be inserted between the genes. For 5′, 3′ overlaps the synthetic insert may comprise: (i) a stop codon; (ii) about 20-200 bp, or 20-100 bp, or 20-50 bp, from upstream of the overlapping region; and (iii) the overlapping region. Preferably, the synthetic insert comprises: (i) a stop codon; (ii) about 20 bp from upstream of the overlapping region; and (iii) the overlapping region. In preferred embodiments the stop codon is in frame with the original start site for the downstream gene. Preferably the stop codon is TAA.

[0262] Preferably the donor sequence(s) (i.e. synthetic region) are collectively 50-10000 kb, 100-5000 kb, 100-2000 kb, 100-1000 kb, or 100-500 kb in size. Preferably each donor sequence is 50-300 kb, 100-200 kb, or about 100 kb in size.

[0263] Accordingly, the donor sequences may each be about 100 kb in size and identical to corresponding sequences of the parent genome, except they comprise no occurrences of one or more sense codons and all pairs of genes which share an overlapping region comprising the one or more sense codons in the parent genome are refactored, wherein the pairs of genes are those in which sense codon replacements would change the encoded protein sequence of both or either of the pair of genes.

[0264] In preferred embodiments the viability of the genome is tested after each round of recombination-mediated genetic engineering. In some embodiments the sequence of the genome is verified after each round of recombination-mediated genetic engineering.

[0265] Partially Synthetic Genomes

[0266] The present invention provides two or more different partially synthetic genomes.

[0267] As used herein a “partially synthetic genome” is a genome in which one or more contiguous regions of the parent genome have been edited (i.e. the partially synthetic genomes comprise one or more synthetic regions), wherein one or more contiguous (synthetic) regions do not cover the whole of the parent genome. Preferably, the partially synthetic genomes of the present invention have one contiguous (synthetic) region. In contrast, a “synthetic genome” may comprise genome edits which cover substantially all of the parent genome.

[0268] The partially synthetic genomes of the present invention may be prokaryotic genomes. Preferably, the partially synthetic genomes of the present invention are bacterial genomes. More preferably, the partially synthetic genomes of the present invention are Escherichia coli, Salmonella enterica, or Shigella dysenteriae genomes. Most preferably, the partially synthetic genomes of the present invention are E. coli genomes. In some embodiments the partially synthetic genomes are reduced or minimal partially synthetics genomes. In preferred embodiments, the partially synthetic genomes are viable genomes.

[0269] In some embodiments the partially synthetic genomes of the present invention are 100 kb to 20 Mb, or 130 kb to 15 Mb, or 200 kb to 15 Mb, or 300 kb to 15 Mb, or 500 kb to 15 Mb, or 1 Mb to 15 Mb, or 1 Mb to 10 Mb, or 1 Mb to 8 Mb, or 1 Mb to 6 Mb, or 2 Mb to 6 Mb, or 2 Mb to 5Mb, or 3 Mb to 5 Mb, or about 4 Mb in size.

[0270] The partially synthetic genomes may comprise a synthetic region that has 50 or fewer, 20 or fewer, 10 or fewer, 5 or fewer, or 0 occurrences of each of one or more sense codons; or the partially synthetic genomes may comprise a synthetic region that has less than 10%, 5%, 2%, 1%, 0.5%, 0.1% of the occurrences of each of one or more sense codons, relative to the corresponding region in the parent genome.

[0271] Preferably, the synthetic regions are 50-10000 kb, 100-5000 kb, or 100-500 kb in size.

[0272] Thus, the partially synthetic genomes may comprise one or more contiguous regions of 100-5000 kb that have 10 or fewer, 5 or fewer, or no occurrences of each of one or more sense codons; and/or the partially synthetic genomes may comprise one or more contiguous regions of 100-5000 kb that have less than 10%, 5%, 2%, 1%, 0.5%, 0.1% of the occurrences of each of one or more sense codons, relative to the corresponding region in the parent genome; and/or the partially synthetic genomes may comprise one or more contiguous regions of 100-5000 kb that have 10 or more, 20 or more, or 100 or more genes with no occurrences of one or more sense codons

[0273] The remainder of the partially synthetic genome (i.e. the non-synthetic region(s)) may have un-altered sense codons. Thus, the partially synthetic genomes may comprise one or more non-synthetic region(s) that have 100% or 99% of the occurrences of each sense codons, relative to the corresponding region in the parent genome; and/or the partially synthetic genomes may comprise one or more non-synthetic region(s) that have 100 or more genes with occurrences of each sense codon. The non-synthetic regions may be 500 kb to 20 Mb, or 500 kb to 10 Mb, or 500 kb to 5 Mb, or about 3.5 Mb in size.

[0274] For example, the partially synthetic genomes may comprise one contiguous region (i.e. a synthetic region) of 100-5000 kb that has 10 or more, 20 or more, or 100 or more genes with no occurrences of one or more sense codons and one contiguous region of 500 kb-10000 kb (i.e. a non-synthetic region) that has 100 or more genes with occurrences of each sense codon.

[0275] The two or more different partially synthetic genomes may be derived from the same parent genome, i.e. comprise substantially the same sequences, e.g. the two or more different partially synthetic genomes may share 90%, 95%, 99%, or 99.5% sequence identity.

[0276] The two or more different partially synthetic genomes may comprise one or more synthetic regions, such that the synthetic regions collectively cover 90% or greater, 95% or greater, 99% or greater or 100% of the parent genome. Preferably, the two or more different partially synthetic genomes each comprise one or more synthetic regions, wherein the synthetic regions do not substantially overlap, (e.g. the overlap between synthetic regions is 10 kb or less, preferably about 3-4 kb). Thus, the two or more different partially synthetic genomes may each comprise one unique or substantially unique synthetic region.

[0277] Thus, in preferred embodiments the two or more different partially synthetic genomes each comprise one contiguous synthetic region of 100-5000 kb that has 10 or more, 20 or more, or 100 or more genes with no occurrences of one or more sense codons and one non-synthetic contiguous region of 500 kb-10000 kb that has 100 or more genes with occurrences of each sense codon; wherein the synthetic regions collectively cover substantially all of the parent genome and wherein the synthetic regions do not substantially overlap.

[0278] The two or more different partially synthetic genomes may be suitable for directed conjugation. Thus, in preferred embodiments the two or more different partially synthetic genomes comprise at least one partially synthetic donor genome and at least one partially synthetic recipient genome. The method of the invention may comprise a further step of one or more rounds of recombination-mediated genetic engineering, preferably lambda red mediated genetic engineering (prior to directed conjugation) to provide at least one partially synthetic donor genome and at least one partially synthetic recipient genome. The method may further comprise one or more rounds of selection for the at least one partially synthetic donor genome and at least one partially synthetic recipient genome.

[0279] The at least one partially synthetic donor genome may comprise a synthetic region and a first selectable marker flanked by two homology regions immediately downstream of an origin of transfer; and the at least one partially synthetic recipient genome may comprise a second selectable marker flanked by two corresponding homology regions, optionally wherein the first selectable marker comprises a positive selectable marker, and/or the second selectable marker comprises a negative selectable marker.

[0280] Suitably the negative selectable marker is selected from the group consisting of sacB (sucrose sensitivity), rpsL (S12 ribosomal protein—streptomycin sensitivity), or phe^{ST251A_A294G} (4-chlorophenylalanine sensitivity). Suitably the positive selectable marker is selected from the group consisting of Cm^{R} (chloramphenicol resistance), Kan^{R} (kanamycin resistance), Hyg^{R} (hygromycin resistance), Gentamycin^{R} (gentamycin resistance), or tetracycline^{R} (tetracycline resistance). The selectable markers may be different to those in the one or more steps of recombination-mediated genetic engineering.

[0281] Preferably the synthetic region present in the at least one partially synthetic recipient genomes is outside the region flanked by the homology regions, i.e. the synthetic regions do not substantially overlap. Preferably the homology regions are 3 kb to 500 kb in length, most preferably about 3-5 kb.

[0282] Directed Conjugation

[0283] One or more rounds of directed conjugation may be carried out on the two or more different partially synthetic genomes of the present invention to produce a synthetic genome.

[0284] Each round of directed conjugation may be used to provide partially synthetic genomes with larger contiguous synthetic regions. For example, after the one or more rounds of recombination-mediated genetic engineering there may be 8 partially synthetic genomes, each with a contiguous synthetic region of about 500 kb. After a first round of directed conjugation, two of the partially synthetic genomes may be combined to provide 6 partially synthetic genomes, each with a contiguous synthetic region of about 500 kb and 1 partially synthetic genome with contiguous synthetic region of about 1 Mb. A second round may provide either 5 partially synthetic genomes, each with a contiguous synthetic region of about 500 kb and 1 partially synthetic genome with contiguous synthetic region of about 1.5 Mb; or 4 partially synthetic genomes, each with a contiguous synthetic region of about 500 kb and 2 partially synthetic genome each with a contiguous synthetic region of about 1 Mb. After several rounds of directed conjugation a completely synthetic genome (i.e. one with a contiguous synthetic region of about 4 Mb) may be provided. An example is shown schematically in FIGS. 10 and 11b.

[0285] Any suitable method of directed conjugation may be used. Methods of directed conjugation will be well known to those of skill in the art, for instance as described by Ma, N. J., Moonan, D. W. and Isaacs, F. J., 2014. Nature Protocols, 9(10), p.2285. The route to the synthetic genome is not limited.

[0286] Thus, the one or more rounds of directed conjugation may comprise:
[0287] i) providing a first host cell comprising a partially synthetic recipient genome, and a second host cell comprising a partially synthetic donor genome and a conjugative plasmid;
[0288] ii) a step of conjugation of the partially synthetic recipient genome and partially synthetic donor genome; and
[0289] iii) selecting for recombinants having incorporated the synthetic region of the donor genome into the partially synthetic recipient genome.

[0290] The partially synthetic donor genome may comprise a synthetic region and a first selectable marker flanked by two homology regions immediately downstream of an origin of transfer; and the partially synthetic recipient genomes may comprise a second selectable marker flanked by two corresponding homology regions, optionally wherein the first selectable marker comprises a positive selectable marker, and/or the second selectable marker comprises a negative selectable marker. Thus, step (iii) may comprise selection for said selectable markers, i.e. selection for gain of the first selectable marker and loss of the second selectable marker.

[0291] Suitably the negative selectable marker is selected from the group consisting of sacB (sucrose sensitivity), rpsL (S12 ribosomal protein—streptomycin sensitivity), or phe^{ST251A_A294G} (4-chlorophenylalanine sensitivity). Suitably the positive selectable marker is selected from the group consisting of Cm^{R} (chloramphenicol resistance), Kan^{R} (kanamycin resistance), Hyg^{R} (hygromycin resistance), Gentamycin^{R} (gentamycin resistance), or tetracycline^{R} (tetracycline resistance). The selectable markers may be different to those in the one or more steps of recombination-mediated genetic engineering.

[0292] Preferably the homology regions are 3 kb to 500 kb in length, most preferably about 3-5 kb. Preferably, the homology regions are 50 kb to 500 kb when the step of directed conjugation is the final step of directed conjugation.

[0293] Step (ii) may comprise incubating the first host cell and the second host cell. For example, first host cell and the second host cell may be mixed, transferred onto a suitable medium (e.g. agar plates) and incubated at about 37° C. for about 1-3 hours.

[0294] The conjugative plasmid may be an F plasmid, preferably wherein the conjugative plasmid does not comprise an origin of transfer. (e.g FIG. 22c).

[0295] In preferred embodiments the viability of the genome is tested after each round of directed conjugation. Advantageously, this verifies that the genome edits (e.g. sense codon replacements) result in a viable genome, and allows for non-permitted edits to be corrected. In some embodiments the sequence of the genome is verified after each round of directed conjugation.

[0296] The skilled person will understand that they can combine all features of the invention disclosed herein without departing from the scope of the invention as disclosed.

[0297] Preferred features and embodiments of the invention will now be described by way of non-limiting examples.

[0298] The practice of the present invention will employ, unless otherwise indicated, conventional techniques of chemistry, biochemistry, molecular biology, microbiology and immunology, which are within the capabilities of a person of ordinary skill in the art. Such techniques are explained in the literature. See, for example, Sambrook, J., Fritsch, E. F. and Maniatis, T. (1989) Molecular Cloning: A Laboratory Manual, 2nd Edition, Cold Spring Harbor Laboratory Press; Ausubel, F. M. et al. (1995 and periodic supplements) Current Protocols in Molecular Biology, Ch. 9, 13 and 16, John Wiley & Sons; Roe, B., Crabtree, J. and Kahn, A. (1996) DNA Isolation and Sequencing: Essential Techniques, John Wiley & Sons; Polak, J. M. and McGee, J. O'D. (1990) In Situ Hybridization: Principles and Practice, Oxford University Press; Gait, M. J. (1984) Oligonucleotide Synthesis: A Practical Approach, IRL Press; and Lilley, D. M. and Dahlberg, J. E. (1992) Methods in Enzymology: DNA Structures Part A: Synthesis and Physical Analysis of DNA, Academic Press.

### EXAMPLES

### Example 1

### Design of a Genome with Synonymous Codon Compression

[0299] We first designed a version of the E. coli MDS42 genome (Uniprot accession number AP012306.1) in which the serine codons TCG and TCA and the stop codon TAG in open reading frames (ORFs) are systematically replaced by their synonyms AGC, AGT, and TAA, respectively (FIG. 1a, FIG. 18, SEQ ID NO: 1). We have previously shown that this defined recoding scheme for synonymous codon compression is allowed on a 20 kb region of the E. coil genome rich in essential genes (Wang, K. et al., 2016. Nature 539, 59-64). However, this region only accounts for 0.46% of the target codons in the genome.

[0300] E. coli contains numerous overlapping open reading frames (ORFs), and we classify the overlaps as 3′, 3′ (between ORFs in opposite orientations) or 5′, 3′ (between ORFs in the same orientation). Targeted codons are found within both classes of overlap. If the recoding of each ORF within a 3′, 3′ overlap could be achieved without changing the encoded protein sequence of either ORF—i.e.: by introducing synonymous codon(s)—then the overlap structure was maintained and the sequences were directly recoded. However, when this was not possible we duplicated the overlapping region, and individually recoded each ORFs (FIG. 1b, Table 1).

[0301] For 5′, 3′ overlaps we separated the ORFs by duplicating both the region of overlap between the ORFs and the 20 bp sequence upstream of the overlap. This refactoring allows us to recode each ORF independently (FIG. 1c, Table 1). Our strategy preserves the sequence of the RBS for the downstream ORF and the distance between this RBS and its start codon.

[0302] Using the defined rules for synonymous codon compression and refactoring we designed a genome in which all 18,218 target codons are recoded to their target synonyms (FIG. 1d).

TABLE 1
Overlaps and refactoring
Listed are the 92 cases of overlaps accounted for by refactoring in the MDS42 designed
genome (FIG. 18, SEQ ID NO: 1). Provided is additional information about genomic location,
surrounding genes, overlap length, codons changed, and the refactoring strategy implemented.

| | | Up- | Down- | | | | | Over- | | | Re- |
|---|---|---|---|---|---|---|---|---|---|---|---|
| | Overlap | stream | stream | | | | | lap | Codons | | factoring |
| No. | type | gene | gene | Start | End | Start | End | length | changed | Strategy | length |
| 1 | Head-to-tail | kefF | kefC | 42,594 | 42,625 | 42,594 | 42,601 | 8 | 1 | Duplication + in-frame TAA STOP | 32 |
| | | | | | | | | | | codon + 20 nt insertion | |
| 2 | Head-to-tail | ftsl | murE | 88,023 | 88,060 | 87,991 | 88,004 | 14 | 1 | Duplication + in-frame TAA STOP | 38 |
| | | | | | | | | | | codon + 20 nt insertion | |
| 3 | Head-to-tail | murF | mraY | 90,897 | 90,928 | 90,827 | 90,833 | 7 | 1 | Duplication + in-frame TAA STOP | 32 |
| | | | | | | | | | | codon + 20 nt insertion | |
| 4 | Head-to-tail | yaeQ | yaeJ | 203,847 | 203,875 | 203,694 | 203,697 | 4 | 1 | Duplication + in-frame TAA STOP | 29 |
| | | | | | | | | | | codon + 20 nt insertion | |
| 5 | Tail-to-tail | yafJ | yafK | 234,139 | 234,168 | 233,927 | 233,956 | 30 | 1 | Duplication | 30 |
| 6 | Head-to-tail | yahE | yahF | 263,179 | 263,213 | 262,967 | 262,977 | 11 | 1 | Duplication + in-frame TAA STOP | 35 |
| | | | | | | | | | | codon + 20 nt insertion | |
| 7 | Head-to-tail | codB | codA | 282,607 | 282,641 | 282,360 | 282,370 | 11 | 1 | Duplication + in-frame TAA STOP | 35 |
| | | | | | | | | | | codon + 20 nt insertion | |
| 8 | Head-to-tail | mhpD | mhpF | 299,392 | 299,420 | 299,110 | 299,113 | 4 | 1 | Duplication + in-frame TAA STOP | 29 |
| | | | | | | | | | | codon + 20 nt insertion | |
| 9 | Head-to-tail | yajL | panE | 351,696 | 351,757 | 351,347 | 351,384 | 38 | 2 | Duplication + in-frame TAA STOP | 62 |
| | | | | | | | | | | codon + 20 nt insertion | |
| 10 | Head-to-tail | mdlA | mdlB | 378,752 | 378,783 | 378,379 | 378,386 | 8 | 1 | Duplication + in-frame TAA STOP | 32 |
| | | | | | | | | | | codon + 20 nt insertion | |
| 11 | Head-to-tail | hemH | aes | 407,162 | 407,162 | 406,757 | 406,760 | 4 | 1 | Slietn mutation CGC to CGT (Arg) | |
| 12 | Head-to-tail | ybbL | ybbM | 424,731 | 424,768 | 424,326 | 424,339 | 14 | 1 | Duplication + in-frame TAA STOP | 38 |
| | | | | | | | | | | codon + 20 nt insertion | |
| 13 | Head-to-tail | ybbO | tesA | 427,336 | 427,370 | 426,882 | 426,892 | 11 | 1 | Duplication + in-frame TAA STOP | 35 |
| | | | | | | | | | | codon + 20 nt insertion | |
| 14 | Head-to-tail | citG | citX | 521,504 | 521,553 | 521,000 | 521,025 | 26 | 2 | Duplication + in-frame TAA STOP | 50 |
| | | | | | | | | | | codon + 20 nt insertion | |
| 15 | Head-to-tail | nei | abrB | 609,986 | 609,987 | 609,456 | 609,459 | 4 | 2 | Silent mutations CAC to CAT (His), | |
| | | | | | | | | | | GCC to GCT (Ala) | |
| 16 | Tail-to-tail | ybhQ | ybhR | 688,302 | 688,340 | 687,735 | 687,773 | 39 | 1 | Duplication | 39 |
| 17 | Head-to-tail | ybhG | ybiH | 693,272 | 693,292 | 692,705 | 692,705 | 1 | 1 | Duplication + in-frame TAA STOP | 21 |
| | | | | | | | | | | codon + 20 nt insertion | |
| 18 | Head-to-tail | ylil | yliJ | 743,178 | 743,178 | 742,587 | 742,590 | 4 | 1 | Silent mutation AGC to AGT (Ser) | |
| 19 | Head-to-tail | ybjR | ybjS | 769,064 | 769,064 | 768,473 | 768,476 | 4 | 1 | Silent mutation CGC to CGT (Arg) | |
| 20 | Head-to-tail | ycaR | kdsB | 834,173 | 834,201 | 833,585 | 833,588 | 4 | 1 | Duplication + in-frame TAA STOP | 29 |
| | | | | | | | | | | codon + 20 nt insertion | |
| 21 | Tail-to-tail | ycbJ | ycbC | 835,996 | 836,019 | 835,355 | 835,378 | 24 | 2 | Duplication | 24 |
| 22 | Head-to-tail | ycbW | ycbX | 869,865 | 869,865 | 869,224 | 869,227 | 4 | 1 | Silent mutation GTC to GTT (Val) | |
| 23 | Tail-to-tail | yccR | yccS | 885,142 | 885,179 | 884,463 | 884,500 | 38 | 1 | Duplication | 38 |
| 24 | Head-to-tail | hyaC | hyaD | 899,182 | 899,210 | 898,503 | 898,506 | 4 | 1 | Duplication + in-frame TAA STOP | 29 |
| | | | | | | | | | | codon + 20 nt insertion | |
| 25 | Head-to-tail | hyaE | hyaF | 900,190 | 900,218 | 899,482 | 899,485 | 4 | 1 | Duplication + in-frame TAA STOP | 29 |
| | | | | | | | | | | codon + 20 nt insertion | |
| 26 | Tail-to-tail | torT | torR | 912,244 | 912,271 | 911,479 | 911,506 | 28 | 1 | Duplication | 28 |
| 27 | Head-to-tail | torA | torD | 916,781 | 916,809 | 916,016 | 916,019 | 4 | 1 | Duplication + in-frame TAA STOP | 29 |
| | | | | | | | | | | codon + 20 nt insertion | |
| 28 | Head-to-tail | ycfM | ycfN | 995,426 | 995,469 | 994,632 | 994,651 | 20 | 1 | Duplication + in-frame TAA STOP | 44 |
| | | | | | | | | | | codon + 20 nt insertion | |
| 29 | Head-to-tail | sapC | sapB | 1,159,586 | 1,159,623 | 1,158,734 | 1,158,747 | 14 | 1 | Duplication + in-frame TAA STOP | 38 |
| | | | | | | | | | | codon + 20 nt insertion | |
| 30 | Head-to-tail | ycjV | ymjB | 1,186,895 | 1,186,915 | 1,186,018 | 1,186,018 | 1 | 1 | Duplication + in-frame TAA STOP | 21 |
| | | | | | | | | | | codon + 20 nt insertion | |
| 31 | Tail-to-tail | rimL | ydcK | 1,212,937 | 1,212,945 | 1,212,031 | 1,212,039 | 9 | 1 | Duplication | 9 |
| 32 | Head-to-tail | ddpD | ddpC | 1,266,751 | 1,266,779 | 1,265,841 | 1,265,844 | 4 | 1 | Duplication + in-frame TAA STOP | 29 |
| | | | | | | | | | | codon + 20 nt insertion | |
| 33 | Head-to-tail | ego | IsrC | 1,310,781 | 1,310,812 | 1,309,846 | 1,309,852 | 7 | 1 | Duplication + in-frame TAA STOP | 32 |
| | | | | | | | | | | codon + 20 nt insertion | |
| 34 | Tail-to-tail | ydjQ | ydjR | 1,506,953 | 1,506,993 | 1,505,945 | 1,505,985 | 41 | 1 | Duplication | 41 |
| 35 | Head-to-tail | astA | astC | 1,513,357 | 1,513,385 | 1,512,345 | 1,512,348 | 4 | 1 | Duplication + in-frame TAA STOP | 29 |
| | | | | | | | | | | codon + 20 nt insertion | |
| 36 | Tail-to-tail | nudG | ynjH | 1,524,518 | 1,524,552 | 1,523,446 | 1,523,480 | 35 | 1 | Duplication | 35 |
| 37 | Tail-to-tail | yeaL | yeaM | 1,556,017 | 1,556,060 | 1,554,901 | 1,554,944 | 44 | 3 | Duplication | 44 |
| 38 | Head-to-tail | yebS | yebT | 1,598,772 | 1,598,827 | 1,597,656 | 1,597,687 | 32 | 2 | Duplication + in-frame TAA STOP | 56 |
| | | | | | | | | | | codon + 20 nt insertion | |
| 39 | Head-to-tail | exoX | ptrB | 1,608,100 | 1,608,100 | 1,606,925 | 1,606,928 | 4 | 1 | Silent mutation GAC to GAT (Asp) | |
| 40 | Head-to-tail | znuC | znuB | 1,624,732 | 1,624,760 | 1,623,560 | 1,623,563 | 4 | 1 | Duplication + in-frame TAA STOP | 29 |
| | | | | | | | | | | codon + 20 nt insertion | |
| 41 | Head-to-tail | otsA | otsB | 1,646,196 | 1,646,245 | 1,644,969 | 1,644,994 | 26 | 1 | Duplication + in-frame TAA STOP | 50 |
| | | | | | | | | | | codon + 20 nt insertion | |
| 42 | Tail-to-tail | yedA | vsr | 1,668,526 | 1,668,537 | 1,667,263 | 1,667,274 | 12 | 1 | Duplication | 12 |
| 43 | Head-to-tail | vsr | dcm | 1,668,997 | 1,669,040 | 1,667,714 | 1,667,733 | 20 | 1 | Duplication + in-frame TAA STOP | 44 |
| | | | | | | | | | | codon + 20 nt insertion | |
| 44 | Tail-to-tail | yegV | yegW | 1,757,516 | 1,757,542 | 1,756,182 | 1,756,208 | 27 | 2 | Duplication | 27 |
| 45 | Head-to-tail | yehP | yehQ | 1,784,581 | 1,784,609 | 1,783,247 | 1,783,250 | 4 | 1 | Duplication + in-frame TAA STOP | 29 |
| | | | | | | | | | | codon + 20 nt insertion | |
| 46 | Head-to-tail | yeiT | yeiA | 1,810,775 | 1,810,806 | 1,809,412 | 1,809,418 | 7 | 1 | Duplication + in-frame TAA STOP | 32 |
| | | | | | | | | | | codon + 20 nt insertion | |
| 47 | Head-to-tail | ccmF | ccME | 1,866,667 | 1,866,695 | 1,865,268 | 1,865,271 | 4 | 1 | Duplication + in-frame TAA STOP | 29 |
| | | | | | | | | | | codon + 20 nt insertion | |
| 48 | Head-to-tail | napB | napH | 1,870,510 | 1,870,538 | 1,869,082 | 1,869,085 | 4 | 1 | Duplication + in-frame TAA STOP | 29 |
| | | | | | | | | | | codon + 20 nt insertion | |
| 49 | Head-to-tail | napH | napG | 1,871,399 | 1,871,436 | 1,869,932 | 1,869,945 | 14 | 1 | Duplication + in-frame TAA STOP | 38 |
| | | | | | | | | | | codon + 20 nt insertion | |
| 50 | Head-to-tail | yfbG | yfbH | 1,941,876 | 1,941,904 | 1,940,385 | 1,940,388 | 4 | 1 | Duplication + in-frame TAA STOP | 29 |
| | | | | | | | | | | codon + 20 nt insertion | |
| 51 | Head-to-tail | eutA | eutH | 2,114,032 | 2,114,060 | 2,112,508 | 2,112,511 | 4 | 1 | Duplication + in-frame TAA STOP | 29 |
| | | | | | | | | | | codon + 20 nt insertion | |
| 52 | Tail-to-tail | csiE | hcaT | 2,213,892 | 2,213,900 | 2,212,334 | 2,212,342 | 9 | 2 | Duplication | 9 |
| 53 | Head-to-tail | yfiM | kgtP | 2,271,633 | 2,271,633 | 2,270,075 | 2,270,078 | 4 | 1 | Silent mutation CAC to CAT (His) | |
| 54 | Head-to-tail | srlA | srlE | 2,338,485 | 2,338,513 | 2,336,927 | 2,336,930 | 4 | 1 | Duplication + in-frame TAA STOP | 29 |
| | | | | | | | | | | codon + 20 nt insertion | |
| 55 | Head-to-tail | hypB | hypC | 2,363,986 | 2,364,020 | 2,362,399 | 2,362,408 | 10 | 1 | Duplication + in-frame TAA STOP | 35 |
| | | | | | | | | | | codon + 20 nt insertion | |
| 56 | Head-to-tail | ygbJ | ygbK | 2,374,492 | 2,374,520 | 2,372,870 | 2,372,873 | 4 | 1 | Duplication + in-frame TAA STOP | 29 |
| | | | | | | | | | | codon + 20 nt insertion | |
| 57 | Head-to-tail | ygcN | ygcO | 2,406,105 | 2,406,139 | 2,404,454 | 2,404,463 | 10 | 1 | Duplication + in-frame TAA STOP | 35 |
| | | | | | | | | | | codon + 20 nt insertion | |
| 58 | Head-to-tail | ppdC | ygdB | 2,474,986 | 2,475,026 | 2,473,284 | 2,473,299 | 16 | 1 | Duplication + in-frame TAA STOP | 41 |
| | | | | | | | | | | codon + 20 nt insertion | |
| 59 | Tail-to-tail | lysR | ygeA | 2,492,219 | 2,492,232 | 2,490,478 | 2,490,491 | 14 | 2 | Duplication | 14 |
| 60 | Head-to-tail | hybB | hybA | 2,626,155 | 2,626,189 | 2,624,403 | 2,624,413 | 11 | 1 | Duplication + in-frame TAA STOP | 35 |
| | | | | | | | | | | codon + 20 nt insertion | |
| 61 | Head-to-tail | yraM | yraN | 2,770,503 | 2,770,570 | 2,768,727 | 2,768,769 | 43 | 1 | Duplication + in-frame TAA STOP | 68 |
| | | | | | | | | | | codon + 20 nt insertion | |
| 62 | Tail-to-tail | yhbO | yhbP | 2,774,670 | 2,774,690 | 2,772,805 | 2,772,825 | 21 | 1 | Duplication | 21 |
| 63 | Head-to-tail | mreD | mreC | 2,868,593 | 2,868,613 | 2,866,727 | 2,866,727 | 1 | 1 | Duplication + 20 nt insertion | 21 |
| 64 | Head-to-tail | yheT | yheU | 2,938,030 | 2,938,061 | 2,936,144 | 2,936,150 | 7 | 1 | Duplication + in-frame TAA STOP | 32 |
| | | | | | | | | | | codon + 20 nt insertion | |
| 65 | Tail-to-tail | yhhA | ugpQ | 3,037,319 | 3,037,332 | 3,035,387 | 3,035,400 | 14 | 1 | Duplication | 14 |
| 66 | Head-to-tail | nikD | nikE | 3,067,725 | 3,067,753 | 3,065,793 | 3,065,796 | 4 | 1 | Duplication + in-frame TAA STOP | 29 |
| | | | | | | | | | | codon + 20 nt insertion | |
| 67 | Head-to-tail | bcsC | bcsZ | 3,130,042 | 3,130,085 | 3,128,062 | 3,128,080 | 19 | 1 | Duplication + in-frame TAA STOP | 44 |
| | | | | | | | | | | codon + 20 nt insertion | |
| 68 | Head-to-tail | bcsA | yhjQ | 3,136,149 | 3,136,177 | 3,134,140 | 3,134,143 | 4 | 1 | Duplication + in-frame TAA STOP | 29 |
| | | | | | | | | | | codon + 20 nt insertion | |
| 69 | Head-to-tail | bcsE | bcsF | 3,138,967 | 3,138,995 | 3,136,933 | 3,136,936 | 4 | 1 | Duplication + in-frame TAA STOP | 29 |
| | | | | | | | | | | codon + 20 nt insertion | |
| 70 | Tail-to-tail | yiaC | bisC | 3,155,063 | 3,155,094 | 3,152,968 | 3,152,999 | 32 | 1 | Duplication | 32 |
| 71 | Head-to-tail | xylG | xylH | 3,173,279 | 3,173,325 | 3,171,184 | 3,171,206 | 23 | 1 | Duplication + in-frame TAA STOP | 47 |
| | | | | | | | | | | codon + 20 nt insertion | |
| 72 | Head-to-tail | sgbU | sgbE | 3,189,692 | 3,189,723 | 3,187,550 | 3,187,556 | 7 | 1 | Duplication + in-frame TAA STOP | 32 |
| | | | | | | | | | | codon + 20 nt insertion | |
| 73 | Tail-to-tail | yibQ | yibD | 3,320,449 | 3,320,462 | 3,218,261 | 3,218,274 | 14 | 1 | Duplication | 14 |
| 74 | Head-to-tail | yicG | ligB | 3,250,889 | 3,250,889 | 3,248,701 | 3,248,704 | 4 | 1 | Silent mutation CAC to CAT (His) | |
| 75 | Head-to-tail | yidG | yidH | 3,287,372 | 3,287,406 | 3,285,173 | 3,285,183 | 11 | 1 | Duplication + in-frame TAA STOP | 35 |
| | | | | | | | | | | codon + 20 nt insertion | |
| 76 | Head-to-tail | cbrA | dgoT | 3,301,877 | 3,301,877 | 3,299,651 | 3,299,654 | 4 | 1 | Silent mutation GGC to GGT (Gly) | |
| 77 | Head-to-tail | rnpA | yidD | 3,316,252 | 3,316,313 | 3,314,029 | 3,314,065 | 37 | 2 | Duplication + in-frame TAA STOP | 62 |
| | | | | | | | | | | codon + 20 nt insertion | |
| 78 | Tail-to-tail | rbsR | hsrA | 3,370,718 | 3,370,752 | 3,368,398 | 3,368,432 | 35 | 4 | Duplication | 35 |
| 79 | Tail-to-tail | yigM | metR | 3,443,509 | 3,443,621 | 3,441,076 | 3,441,188 | 113 | 4 | Duplication | 113 |
| 80 | Head-to-tail | tatD | rfaH | 3,455,982 | 3,455,982 | 3,453,546 | 3,453,549 | 4 | 1 | Silent mutation CTC to CTT (Leu) | |
| 81 | Head-to-tail | cpxA | cpxR | 3,536,622 | 3,536,650 | 3,534,185 | 3,534,188 | 4 | 1 | Duplication + in-frame TAA STOP | 29 |
| | | | | | | | | | | codon + 20 nt insertion | |
| 82 | Head-to-tail | pflD | pflC | 3,577,933 | 3,577,991 | 3,575,471 | 3,575,505 | 35 | 1 | Duplication + in-frame TAA STOP | 59 |
| | | | | | | | | | | codon + 20 nt insertion | |
| 83 | Tail-to-tail | frwD | yijO | 3,579,214 | 3,579,227 | 3,576,679 | 3,576,692 | 14 | 1 | Duplication | 14 |
| 84 | Head-to-tail | murB | birA | 3,604,830 | 3,604,858 | 3,602,295 | 3,602,298 | 4 | 1 | Duplication + in-frame TAA STOP | 29 |
| | | | | | | | | | | codon + 20 nt insertion | |
| 85 | Head-to-tail | zraR | purD | 3,636,422 | 3,636,422 | 3,633,855 | 3,633,858 | 4 | 1 | Silent mutation AAC to AAT (Asn) | |
| 86 | Head-to-tail | actP | yjcH | 3,716,680 | 3,716,708 | 3,714,112 | 3,714,115 | 4 | 1 | Duplication + in-frame TAA STOP | 29 |
| | | | | | | | | | | codon + 20 nt insertion | |
| 87 | Head-to-tail | phnM | phnL | 3,748,914 | 3,748,942 | 3,746,317 | 3,746,320 | 4 | 1 | Duplication + in-frame TAA STOP | 29 |
| | | | | | | | | | | codon + 20 nt insertion | |
| 88 | Head-to-tail | dipZ | cutA | 3,796,767 | 3,796,816 | 3,794,120 | 3,794,144 | 25 | 1 | Duplication + in-frame TAA STOP | 50 |
| | | | | | | | | | | codon + 20 nt insertion | |
| 89 | Head-to-tail | sugE | blc | 3,808,963 | 3,808,963 | 3,806,291 | 3,806,294 | 4 | 1 | Silent mutation CAC to CAT (His) | |
| 90 | Head-to-tail | yjeF | yjeE | 3,827,359 | 3,827,411 | 3,824,687 | 3,824,715 | 29 | 1 | Duplication + in-frame TAA STOP | 53 |
| | | | | | | | | | | codon + 20 nt insertion | |
| 91 | Tail-to-tail | ytfA | ytfB | 3,859,923 | 3,859,939 | 3,857,181 | 3,857,197 | 17 | 1 | Duplication | 17 |

### Example 2

### Synthesis of Recoded Sections

[0303] We performed a retrosynthesis, analogous to that commonly used for designing synthetic routes to small molecules, on the designed genome (FIG. 2). We disconnected the genome into 8 sections, A-H, of approximately 0.5 Mb (FIG. 1d, FIG. 2a, FIG. 18, SEQ ID NO: 1) and then disconnected each section into 4-5 fragments (FIG. 2b). This yielded 37 fragments (FIG. 1d, Table 2) of 91 kb to 136 kb. We placed the boundaries between fragments, and between sections, in intergenic regions between non-essential genes. The fragments were further disconnected into 9-14 stretches of approximately 10 kb (FIG. 2c, Table 2).

[0304] We assembled BACs for REXER (FIG. 2c, FIG. 20) containing each fragment via homologous recombination in S. cerevisiae (Wang, K. et al., 2016. Nature 539, 59-64; and Kouprina, N., et al., 2004. Methods Mol Biol 255, 69-89). For 36 of the fragments, BAC assembly proceeded smoothly (Table 3). Fragment 37 was challenging to assemble and we therefore split it into two 50 kb fragments (37a and 37b), which were straightforward to assemble (Table 3).

[0305] We initiated genome replacement in seven distinct strains, via REXER. The start point for REXER in each strain corresponds to the beginning of sections A, C, D, E, F, G or H (FIG. 1d, 2b, FIG. 3); section B was subsequently built on section A, as described below. We marked the start point of genome replacement in each strain by the introduction of a cassette bearing a positive and negative selection marker. We introduced Cas9 (Jiang, W., et al., 2013. Nat Biotechnol 31, 233-239), the lambda red recombination machinery (Datsenko, K. A. & Wanner, B. L., 2000. Proc Natl Acad Sci USA 97, 6640-6645), and the BAC containing the first recoded fragment for each section into the relevant strain, and initiated replacement of genomic DNA by the addition of DNA encoding the relevant Cas9 spacers (Jiang, W., et al., 2013. Nat Biotechnol 31, 233-239) to the cells. Cas9 mediated excision of the recoded DNA from the BAC and lambda red mediated recombination of this DNA into the genome led to replacement of a section of genomic DNA with recoded DNA, removal of the positive and negative selection markers from the genome, and introduction of new, orthogonal, positive and negative selection markers. Clones that had recombined over the target region were selected on the basis of having lost the negative selection marker from the genome and gained the positive selection marker from the BAC.

[0306] In each strain, the positive and negative selection markers that are introduced in the first REXER provide a template for the next round of REXER, enabling genome stepwise interchange synthesis (GENESIS) (FIG. 2b, FIG. 4). We used plasmid encoded spacers for early rounds of REXER (Table 4, FIG. 20d, FIG. 21). However, we subsequently found that REXER could be initiated by the electroporation of linear double stranded spacers generated by PCR (Table 4, FIG. 21a). Since these spacers do not propagate through cell division this enabled the cells from one step of REXER to be used more rapidly for the next step of REXER. This advance accelerated GENESIS. For sections A, C, D, E, F, and G we proceeded with GENESIS in a clockwise direction for 4-5 steps of REXER, until we had replaced approximately 0.5 Mb of genomic DNA with synthetic DNA. Because section A was initiated first, and was completed ahead of the other sections, we proceeded with GENESIS through section B upon reaching the end of section A.

[0307] Following each REXER we sequenced the resulting genomes to identify cells that were fully recoded over the targeted region of the genome (Table 4). In parallel, we carried out a large number of single step REXERs (Table 4) to rapidly identify 100 kb regions of the genome that may be challenging to recode, before we arrived at them through GENESIS. For 35 of the 38 steps, including all of sections A, C, D, E, F and G, we were able to completely recode the targeted genomic sequence by GENESIS. We only observed incomplete replacement of the corresponding genomic region by synthetic DNA for fragment 9, in section B, and for fragments 37a and 1, in section H, (Table 4).

TABLE 2
Table MDS42 10 kb stretches
The genomic locations are listed for all of the 10 kb stretches which comprise
the designed synthetic MDS42 genome.

| | | Length |
|---|---|---|
| Stretch | 5′ start . . . 3′end | (bp) |
| 100k01-01 | 83,869 . . . 95,593 | 11725 |
| 100k01-02 | 95,399 . . . 101,629 | 6231 |
| 100k01-03 | 101,435 . . . 112,646 | 11212 |
| 100k01-04 | 112,448 . . . 122,780 | 10333 |
| 100k01-05 | 122,621 . . . 132,166 | 9546 |
| 100k01-06 | 131,945 . . . 144,626 | 12682 |
| 100k01-07 | 144,430 . . . 156,454 | 12025 |
| 100k01-08 | 156,309 . . . 162,400 | 6092 |
| 100k01-09 | 162,193 . . . 173,408 | 11216 |
| 100k01-10 | 173,127 . . . 181,748 | 8622 |
| 100k02-01 | 181,678 . . . 191,139 | 9462 |
| 100k02-02 | 191,016 . . . 201,015 | 10000 |
| 100k02-03 | 200,896 . . . 212,598 | 11703 |
| 100k02-04 | 212,483 . . . 220,477 | 7995 |
| 100k02-05 | 220,357 . . . 229,377 | 9021 |
| 100k02-06 | 229,255 . . . 237,503 | 8249 |
| 100k02-07 | 237,380 . . . 248,528 | 11149 |
| 100k02-08 | 248,409 . . . 259,180 | 10772 |
| 100k02-09 | 259,061 . . . 269,318 | 10258 |
| 100k02-10 | 269,196 . . . 279,245 | 10050 |
| 100k02-11 | 279,122 . . . 289,733 | 10612 |
| 100k02-12 | 289,609 . . . 303,206 | 13598 |
| 100k03-01 | 303,144 . . . 313,764 | 10621 |
| 100k03-02 | 313,641 . . . 325,092 | 11452 |
| 100k03-03 | 324,973 . . . 334,137 | 9165 |
| 100k03-04 | 334,018 . . . 343,618 | 9601 |
| 100k03-05 | 343,499 . . . 353,344 | 9846 |
| 100k03-06 | 353,225 . . . 362,491 | 9267 |
| 100k03-07 | 362,373 . . . 371,912 | 9540 |
| 100k03-08 | 371,794 . . . 380,649 | 8856 |
| 100k03-09 | 380,534 . . . 393,822 | 13289 |
| 100k03-10 | 393,703 . . . 405,214 | 11512 |
| 100k03-11 | 405,100 . . . 415,406 | 10307 |
| 100k03-12 | 415,290 . . . 425,574 | 10285 |
| 100k03-13 | 425,457 . . . 437,443 | 11987 |
| 100k04-01 | 437,351 . . . 447,358 | 10008 |
| 100k04-02 | 447,239 . . . 457,565 | 10327 |
| 100k04-03 | 457,446 . . . 466,960 | 9515 |
| 100k04-04 | 466,841 . . . 476,935 | 10095 |
| 100k04-05 | 476,816 . . . 486,528 | 9713 |
| 100k04-06 | 486,409 . . . 496,230 | 9822 |
| 100k04-07 | 496,111 . . . 506,009 | 9899 |
| 100k04-08 | 505,890 . . . 515,348 | 9459 |
| 100k04-09 | 515,231 . . . 525,913 | 10683 |
| 100k04-10 | 525,799 . . . 532,888 | 7090 |
| 100k05-01 | 532,792 . . . 543,100 | 10309 |
| 100k05-02 | 542,981 . . . 555,707 | 12727 |
| 100k05-03 | 555,591 . . . 566,274 | 10684 |
| 100k05-04 | 566,155 . . . 576,486 | 10332 |
| 100k05-05 | 576,367 . . . 588,061 | 11695 |
| 100k05-06 | 587,942 . . . 598,541 | 10600 |
| 100k05-07 | 598,422 . . . 609,162 | 10741 |
| 100k05-08 | 609,043 . . . 617,744 | 8702 |
| 100k05-09 | 617,625 . . . 628,315 | 10691 |
| 100k05-10 | 628,200 . . . 637,895 | 9696 |
| 100k06-01 | 637,794 . . . 648,173 | 10380 |
| 100k06-02 | 648,059 . . . 658,187 | 10129 |
| 100k06-03 | 658,075 . . . 666,632 | 8558 |
| 100k06-04 | 666,513 . . . 676,267 | 9755 |
| 100k06-05 | 676,148 . . . 683,859 | 7712 |
| 100k06-06 | 683,740 . . . 694,050 | 10311 |
| 100k06-07 | 693,931 . . . 705,086 | 11156 |
| 100k06-08 | 704,967 . . . 716,428 | 11462 |
| 100k06-09 | 716,309 . . . 727,640 | 11332 |
| 100k06-10 | 727,521 . . . 736,154 | 8634 |
| 100k06-11 | 736,035 . . . 741,978 | 5944 |
| 100k07-01 | 741,877 . . . 751,411 | 9535 |
| 100k07-02 | 751,295 . . . 763,017 | 11723 |
| 100k07-03 | 762,898 . . . 772,642 | 9745 |
| 100k07-04 | 772,523 . . . 782,523 | 10001 |
| 100k07-05 | 782,406 . . . 794,373 | 11968 |
| 100k07-06 | 794,255 . . . 804,092 | 9838 |
| 100k07-07 | 803,973 . . . 813,644 | 9672 |
| 100k07-08 | 813,527 . . . 823,429 | 9903 |
| 100k07-09 | 823,322 . . . 834,999 | 11678 |
| 100k07-10 | 834,886 . . . 846,335 | 11450 |
| 100k08-01 | 846,246 . . . 856,634 | 10389 |
| 100k08-02 | 856,515 . . . 868,063 | 11549 |
| 100k08-03 | 867,948 . . . 878,862 | 10915 |
| 100k08-04 | 878,744 . . . 889,954 | 11211 |
| 100k08-05 | 889,835 . . . 901,127 | 11293 |
| 100k08-06 | 901,008 . . . 912,978 | 11971 |
| 100k08-07 | 912,859 . . . 922,812 | 9954 |
| 100k08-08 | 922,693 . . . 933,969 | 11277 |
| 100k08-09 | 933,850 . . . 939,693 | 5844 |
| 100k09-01 | 939,575 . . . 949,128 | 9554 |
| 100k09-02 | 949,010 . . . 959,384 | 10375 |
| 100k09-03 | 959,266 . . . 969,156 | 9891 |
| 100k09-04 | 969,037 . . . 978,088 | 9052 |
| 100k09-05 | 977,982 . . . 985,362 | 7381 |
| 100k09-06 | 985,252 . . . 993,763 | 8512 |
| 100k09-07 | 993,644 . . . 1,002,701 | 9058 |
| 100k09-08 | 1,002,582 . . . 1,012,585 | 10004 |
| 100k09-09 | 1,012,466 . . . 1,022,792 | 10327 |
| 100k09-10 | 1,022,673 . . . 1,032,409 | 9737 |
| 100k09-11 | 1,032,290 . . . 1,041,958 | 9669 |
| 100k09-12 | 1,041,839 . . . 1,051,279 | 9441 |
| 100k10-01 | 1,051,179 . . . 1,059,299 | 8121 |
| 100k10-02 | 1,059,181 . . . 1,068,249 | 9069 |
| 100k10-03 | 1,068,138 . . . 1,078,645 | 10508 |
| 100k10-04 | 1,078,526 . . . 1,085,635 | 7110 |
| 100k10-05 | 1,085,516 . . . 1,096,452 | 10937 |
| 100k10-06 | 1,096,333 . . . 1,105,535 | 9203 |
| 100k10-07 | 1,105,418 . . . 1,116,898 | 11481 |
| 100k10-08 | 1,116,780 . . . 1,128,058 | 11279 |
| 100k10-09 | 1,127,939 . . . 1,138,744 | 10806 |
| 100k10-10 | 1,138,625 . . . 1,146,843 | 8219 |
| 100k11-01 | 1,146,759 . . . 1,156,879 | 10121 |
| 100k11-02 | 1,156,760 . . . 1,167,593 | 10834 |
| 100k11-03 | 1,167,474 . . . 1,179,239 | 11766 |
| 100k11-04 | 1,179,121 . . . 1,188,001 | 8881 |
| 100k11-05 | 1,187,883 . . . 1,195,638 | 7756 |
| 100k11-06 | 1,195,519 . . . 1,204,931 | 9413 |
| 100k11-07 | 1,204,812 . . . 1,215,685 | 10874 |
| 100k11-08 | 1,215,566 . . . 1,224,906 | 9341 |
| 100k11-09 | 1,224,787 . . . 1,234,403 | 9617 |
| 100k11-10 | 1,234,284 . . . 1,241,004 | 6721 |
| 100k12-01 | 1,240,898 . . . 1,250,323 | 9426 |
| 100k12-02 | 1,250,204 . . . 1,259,727 | 9524 |
| 100k12-03 | 1,259,614 . . . 1,270,832 | 11219 |
| 100k12-04 | 1,270,713 . . . 1,279,720 | 9008 |
| 100k12-05 | 1,279,601 . . . 1,290,366 | 10766 |
| 100k12-06 | 1,290,252 . . . 1,300,202 | 9951 |
| 100k12-07 | 1,300,085 . . . 1,308,976 | 8892 |
| 100k12-08 | 1,308,863 . . . 1,318,474 | 9612 |
| 100k12-09 | 1,318,355 . . . 1,326,702 | 8348 |
| 100k12-10 | 1,326,583 . . . 1,337,691 | 11109 |
| 100k12-11 | 1,337,572 . . . 1,347,802 | 10231 |
| 100k13-01 | 1,347,689 . . . 1,357,497 | 9809 |
| 100k13-02 | 1,357,378 . . . 1,369,231 | 11854 |
| 100k13-03 | 1,369,112 . . . 1,378,621 | 9510 |
| 100k13-04 | 1,378,502 . . . 1,387,714 | 9213 |
| 100k13-05 | 1,387,595 . . . 1,396,821 | 9227 |
| 100k13-06 | 1,396,702 . . . 1,407,244 | 10543 |
| 100k13-07 | 1,407,125 . . . 1,417,810 | 10686 |
| 100k13-08 | 1,417,698 . . . 1,428,675 | 10978 |
| 100k13-09 | 1,428,564 . . . 1,439,655 | 11092 |
| 100k13-10 | 1,439,544 . . . 1,451,233 | 11690 |
| 100k13-11 | 1,451,116 . . . 1,455,004 | 3889 |
| 100k14-01 | 1,454,886 . . . 1,463,884 | 8999 |
| 100k14-02 | 1,463,770 . . . 1,472,031 | 8262 |
| 100k14-03 | 1,471,918 . . . 1,482,535 | 10618 |
| 100k14-04 | 1,482,417 . . . 1,491,781 | 9365 |
| 100k14-05 | 1,491,664 . . . 1,501,050 | 9387 |
| 100k14-06 | 1,500,931 . . . 1,508,216 | 7286 |
| 100k14-07 | 1,508,097 . . . 1,515,854 | 7758 |
| 100k14-08 | 1,515,737 . . . 1,526,355 | 10619 |
| 100k14-09 | 1,526,250 . . . 1,535,249 | 9000 |
| 100k14-10 | 1,535,130 . . . 1,543,987 | 8858 |
| 100k14-11 | 1,543,868 . . . 1,552,890 | 9023 |
| 100k14-12 | 1,552,774 . . . 1,564,280 | 11507 |
| 100k15-01 | 1,564,174 . . . 1,574,973 | 10800 |
| 100k15-02 | 1,574,856 . . . 1,586,003 | 11148 |
| 100k15-03 | 1,585,891 . . . 1,596,793 | 10903 |
| 100k15-04 | 1,596,677 . . . 1,604,287 | 7611 |
| 100k15-05 | 1,604,170 . . . 1,613,369 | 9200 |
| 100k15-06 | 1,613,258 . . . 1,621,511 | 8254 |
| 100k15-07 | 1,621,392 . . . 1,631,869 | 10478 |
| 100k15-08 | 1,631,750 . . . 1,643,142 | 11393 |
| 100k15-09 | 1,643,023 . . . 1,652,391 | 9369 |
| 100k15-10 | 1,652,280 . . . 1,662,654 | 10375 |
| 100k15-11 | 1,662,547 . . . 1,667,544 | 4998 |
| 100k16-01 | 1,667,429 . . . 1,679,240 | 11812 |
| 100k16-02 | 1,679,126 . . . 1,690,153 | 11028 |
| 100k16-03 | 1,690,044 . . . 1,700,055 | 10012 |
| 100k16-04 | 1,699,936 . . . 1,708,018 | 8083 |
| 100k16-05 | 1,707,899 . . . 1,721,060 | 13162 |
| 100k16-06 | 1,720,941 . . . 1,734,097 | 13157 |
| 100k16-07 | 1,733,974 . . . 1,740,645 | 6672 |
| 100k16-08 | 1,740,525 . . . 1,752,444 | 11920 |
| 100k16-09 | 1,752,326 . . . 1,762,779 | 10454 |
| 100k16-10 | 1,762,660 . . . 1,771,814 | 9155 |
| 100k16-11 | 1,771,695 . . . 1,779,795 | 8101 |
| 100k17-01 | 1,779,708 . . . 1,790,152 | 10445 |
| 100k17-02 | 1,790,035 . . . 1,799,410 | 9376 |
| 100k17-03 | 1,799,291 . . . 1,809,349 | 10059 |
| 100k17-04 | 1,809,230 . . . 1,820,280 | 11051 |
| 100k17-05 | 1,820,169 . . . 1,830,728 | 10560 |
| 100k17-06 | 1,830,609 . . . 1,841,564 | 10956 |
| 100k17-07 | 1,841,445 . . . 1,847,824 | 6380 |
| 100k17-08 | 1,847,705 . . . 1,856,025 | 8321 |
| 100k17-09 | 1,855,909 . . . 1,868,109 | 12201 |
| 100k17-10 | 1,867,998 . . . 1,875,399 | 7402 |
| 100k18-01 | 1,875,300 . . . 1,884,607 | 9308 |
| 100k18-02 | 1,884,488 . . . 1,895,099 | 10612 |
| 100k18-03 | 1,894,990 . . . 1,902,141 | 7152 |
| 100k18-04 | 1,902,022 . . . 1,912,147 | 10126 |
| 100k18-05 | 1,912,028 . . . 1,924,232 | 12205 |
| 100k18-06 | 1,924,113 . . . 1,935,491 | 11379 |
| 100k18-07 | 1,935,372 . . . 1,948,704 | 13333 |
| 100k18-08 | 1,948,593 . . . 1,958,709 | 10117 |
| 100k18-09 | 1,958,599 . . . 1,968,337 | 9739 |
| 100k18-10 | 1,968,218 . . . 1,980,692 | 12475 |
| 100k19-01 | 1,980,585 . . . 1,991,063 | 10479 |
| 100k19-02 | 1,990,945 . . . 2,000,511 | 9567 |
| 100k19-03 | 2,000,394 . . . 2,009,738 | 9345 |
| 100k19-04 | 2,009,619 . . . 2,021,044 | 11426 |
| 100k19-05 | 2,020,925 . . . 2,032,356 | 11432 |
| 100k19-06 | 2,032,247 . . . 2,042,778 | 10532 |
| 100k19-07 | 2,042,664 . . . 2,051,421 | 8758 |
| 100k19-08 | 2,051,315 . . . 2,060,546 | 9232 |
| 100k19-09 | 2,060,429 . . . 2,070,495 | 10067 |
| 100k19-10 | 2,070,376 . . . 2,080,816 | 10441 |
| 100k19-11 | 2,080,701 . . . 2,086,225 | 5525 |
| 100k20-01 | 2,086,123 . . . 2,098,560 | 12438 |
| 100k20-02 | 2,098,441 . . . 2,109,119 | 10679 |
| 100k20-03 | 2,109,000 . . . 2,119,224 | 10225 |
| 100k20-04 | 2,119,107 . . . 2,128,815 | 9709 |
| 100k20-05 | 2,128,696 . . . 2,140,138 | 11443 |
| 100k20-06 | 2,140,019 . . . 2,148,124 | 8106 |
| 100k20-07 | 2,148,005 . . . 2,159,046 | 11042 |
| 100k20-08 | 2,158,927 . . . 2,168,048 | 9122 |
| 100k20-09 | 2,167,929 . . . 2,176,912 | 8984 |
| 100k21-01 | 2,176,796 . . . 2,187,752 | 10957 |
| 100k21-02 | 2,187,633 . . . 2,199,463 | 11831 |
| 100k21-03 | 2,199,344 . . . 2,209,310 | 9967 |
| 100k21-04 | 2,209,193 . . . 2,220,948 | 11756 |
| 100k21-05 | 2,220,829 . . . 2,231,253 | 10425 |
| 100k21-06 | 2,231,134 . . . 2,242,692 | 11559 |
| 100k21-07 | 2,242,573 . . . 2,251,251 | 8679 |
| 100k21-08 | 2,251,132 . . . 2,261,427 | 10296 |
| 100k21-09 | 2,261,308 . . . 2,271,269 | 9962 |
| 100k21-10 | 2,271,152 . . . 2,281,408 | 10257 |
| 100k21-11 | 2,281,307 . . . 2,288,918 | 7612 |
| 100k22-01 | 2,288,816 . . . 2,298,876 | 10061 |
| 100k22-02 | 2,298,760 . . . 2,308,882 | 10123 |
| 100k22-03 | 2,308,763 . . . 2,319,092 | 10330 |
| 100k22-04 | 2,318,973 . . . 2,329,598 | 10626 |
| 100k22-05 | 2,329,483 . . . 2,340,583 | 11101 |
| 100k22-06 | 2,340,464 . . . 2,351,317 | 10854 |
| 100k22-07 | 2,351,225 . . . 2,362,005 | 10781 |
| 100k22-08 | 2,361,906 . . . 2,372,531 | 10626 |
| 100k22-09 | 2,372,430 . . . 2,383,456 | 11027 |
| 100k22-10 | 2,383,337 . . . 2,394,208 | 10872 |
| 100k22-11 | 2,394,089 . . . 2,404,790 | 10702 |
| 100k23-01 | 2,404,684 . . . 2,415,521 | 10838 |
| 100k23-02 | 2,415,402 . . . 2,425,882 | 10481 |
| 100k23-03 | 2,425,783 . . . 2,436,334 | 10552 |
| 100k23-04 | 2,436,215 . . . 2,445,909 | 9695 |
| 100k23-05 | 2,445,795 . . . 2,455,395 | 9601 |
| 100k23-06 | 2,455,304 . . . 2,465,797 | 10494 |
| 100k23-07 | 2,465,678 . . . 2,476,456 | 10779 |
| 100k23-08 | 2,476,337 . . . 2,484,906 | 8570 |
| 100k23-09 | 2,484,787 . . . 2,494,483 | 9697 |
| 100k23-10 | 2,494,384 . . . 2,504,089 | 9706 |
| 100k24-01 | 2,504,021 . . . 2,514,161 | 10141 |
| 100k24-02 | 2,514,042 . . . 2,522,657 | 8616 |
| 100k24-03 | 2,522,558 . . . 2,532,585 | 10028 |
| 100k24-04 | 2,532,466 . . . 2,542,012 | 9547 |
| 100k24-05 | 2,541,893 . . . 2,551,511 | 9619 |
| 100k24-06 | 2,551,392 . . . 2,560,716 | 9325 |
| 100k24-07 | 2,560,597 . . . 2,571,096 | 10500 |
| 100k24-08 | 2,570,983 . . . 2,582,088 | 11106 |
| 100k24-09 | 2,581,969 . . . 2,591,097 | 9129 |
| 100k24-10 | 2,590,993 . . . 2,600,564 | 9572 |
| 100k25-01 | 2,600,470 . . . 2,610,521 | 10052 |
| 100k25-02 | 2,610,402 . . . 2,620,532 | 10131 |
| 100k25-03 | 2,620,433 . . . 2,630,974 | 10542 |
| 100k25-04 | 2,630,855 . . . 2,640,909 | 10055 |
| 100k25-05 | 2,640,790 . . . 2,651,714 | 10925 |
| 100k25-06 | 2,651,615 . . . 2,663,606 | 11992 |
| 100k25-07 | 2,663,487 . . . 2,676,074 | 12588 |
| 100k25-08 | 2,675,955 . . . 2,684,604 | 8650 |
| 100k25-09 | 2,684,486 . . . 2,694,189 | 9704 |
| 100k25-10 | 2,694,070 . . . 2,702,813 | 8744 |
| 100k26-01 | 2,702,720 . . . 2,713,409 | 10690 |
| 100k26-02 | 2,713,290 . . . 2,723,932 | 10643 |
| 100k26-03 | 2,723,813 . . . 2,734,707 | 10895 |
| 100k26-04 | 2,734,609 . . . 2,744,645 | 10037 |
| 100k26-05 | 2,744,565 . . . 2,755,298 | 10734 |
| 100k26-06 | 2,755,179 . . . 2,763,894 | 8716 |
| 100k26-07 | 2,763,778 . . . 2,774,027 | 10250 |
| 100k26-08 | 2,773,908 . . . 2,784,122 | 10215 |
| 100k26-09 | 2,784,005 . . . 2,793,207 | 9203 |
| 100k26-10 | 2,793,088 . . . 2,802,862 | 9775 |
| 100k26-11 | 2,802,743 . . . 2,812,001 | 9259 |
| 100k26-12 | 2,811,882 . . . 2,821,709 | 9828 |
| 100k27-01 | 2,821,611 . . . 2,829,258 | 7648 |
| 100k27-02 | 2,829,139 . . . 2,840,747 | 11609 |
| 100k27-03 | 2,840,629 . . . 2,850,303 | 9675 |
| 100k27-04 | 2,850,184 . . . 2,861,747 | 11564 |
| 100k27-05 | 2,861,628 . . . 2,874,224 | 12597 |
| 100k27-06 | 2,874,125 . . . 2,883,204 | 9080 |
| 100k27-07 | 2,883,085 . . . 2,892,886 | 9802 |
| 100k27-08 | 2,892,767 . . . 2,903,307 | 10541 |
| 100k27-09 | 2,903,192 . . . 2,912,470 | 9279 |
| 100k27-10 | 2,912,359 . . . 2,925,141 | 12783 |
| 100k27-11 | 2,925,022 . . . 2,934,913 | 9892 |
| 100k27-12 | 2,934,794 . . . 2,947,632 | 12839 |
| 100k28-01 | 2,947,528 . . . 2,958,629 | 11102 |
| 100k28-02 | 2,958,510 . . . 2,969,760 | 11251 |
| 100k28-03 | 2,969,641 . . . 2,979,981 | 10341 |
| 100k28-04 | 2,979,863 . . . 2,991,128 | 11266 |
| 100k28-05 | 2,991,016 . . . 3,001,647 | 10632 |
| 100k28-06 | 3,001,530 . . . 3,011,921 | 10392 |
| 100k28-07 | 3,011,802 . . . 3,017,818 | 6017 |
| 100k28-08 | 3,017,699 . . . 3,029,508 | 11810 |
| 100k28-09 | 3,029,389 . . . 3,040,739 | 11351 |
| 100k28-10 | 3,040,621 . . . 3,049,609 | 8989 |
| 100k28-11 | 3,049,490 . . . 3,061,680 | 12191 |
| 100k28-12 | 3,061,561 . . . 3,073,892 | 12332 |
| 100k28-13 | 3,073,773 . . . 3,083,864 | 10092 |
| 100k29-01 | 3,083,760 . . . 3,093,964 | 10205 |
| 100k29-02 | 3,093,855 . . . 3,104,401 | 10547 |
| 100k29-03 | 3,104,282 . . . 3,115,243 | 10962 |
| 100k29-04 | 3,115,124 . . . 3,126,447 | 11324 |
| 100k29-05 | 3,126,328 . . . 3,137,036 | 10709 |
| 100k29-06 | 3,136,946 . . . 3,146,763 | 9818 |
| 100k29-07 | 3,146,648 . . . 3,157,292 | 10645 |
| 100k29-08 | 3,157,193 . . . 3,166,872 | 9680 |
| 100k29-09 | 3,166,754 . . . 3,176,818 | 10065 |
| 100k29-10 | 3,176,729 . . . 3,190,320 | 13592 |
| 100k29-11 | 3,190,200 . . . 3,197,411 | 7212 |
| 100k29-12 | 3,197,292 . . . 3,205,624 | 8333 |
| 100k30-01 | 3,205,520 . . . 3,215,838 | 10319 |
| 100k30-02 | 3,215,720 . . . 3,223,955 | 8236 |
| 100k30-03 | 3,223,836 . . . 3,232,308 | 8473 |
| 100k30-04 | 3,232,188 . . . 3,242,559 | 10372 |
| 100k30-05 | 3,242,448 . . . 3,252,486 | 10039 |
| 100k30-06 | 3,252,362 . . . 3,261,740 | 9379 |
| 100k30-07 | 3,261,617 . . . 3,271,913 | 10297 |
| 100k30-08 | 3,271,802 . . . 3,282,128 | 10327 |
| 100k30-09 | 3,282,026 . . . 3,292,438 | 10413 |
| 100k30-10 | 3,292,317 . . . 3,301,878 | 9562 |
| 100k30-11 | 3,301,760 . . . 3,308,902 | 7143 |
| 100k30-12 | 3,308,784 . . . 3,319,704 | 10921 |
| 100k31-01 | 3,319,643 . . . 3,330,096 | 10454 |
| 100k31-02 | 3,329,973 . . . 3,339,866 | 9894 |
| 100k31-03 | 3,339,748 . . . 3,347,473 | 7726 |
| 100k31-04 | 3,347,354 . . . 3,353,926 | 6573 |
| 100k31-05 | 3,353,798 . . . 3,358,503 | 4706 |
| 100k31-06 | 3,358,382 . . . 3,364,683 | 6302 |
| 100k31-07 | 3,364,562 . . . 3,372,812 | 8251 |
| 100k31-08 | 3,372,694 . . . 3,381,488 | 8795 |
| 100k31-09 | 3,381,367 . . . 3,391,350 | 9984 |
| 100k31-10 | 3,391,231 . . . 3,397,632 | 6402 |
| 100k31-11 | 3,397,509 . . . 3,405,953 | 8445 |
| 100k31-12 | 3,405,834 . . . 3,412,263 | 6430 |
| 100k32-01 | 3,412,160 . . . 3,425,218 | 13059 |
| 100k32-02 | 3,425,094 . . . 3,436,233 | 11140 |
| 100k32-03 | 3,436,117 . . . 3,447,693 | 11577 |
| 100k32-04 | 3,447,587 . . . 3,458,871 | 11285 |
| 100k32-05 | 3,458,754 . . . 3,473,651 | 14898 |
| 100k32-06 | 3,473,525 . . . 3,485,082 | 11558 |
| 100k32-07 | 3,484,960 . . . 3,495,175 | 10216 |
| 100k32-08 | 3,495,050 . . . 3,505,175 | 10126 |
| 100k32-09 | 3,505,056 . . . 3,511,192 | 6137 |
| 100k32-10 | 3,511,087 . . . 3,521,547 | 10461 |
| 100k33-01 | 3,521,422 . . . 3,532,175 | 10754 |
| 100k33-02 | 3,532,076 . . . 3,542,259 | 10184 |
| 100k33-03 | 3,542,143 . . . 3,552,029 | 9887 |
| 100k33-04 | 3,551,907 . . . 3,560,073 | 8167 |
| 100k33-05 | 3,559,950 . . . 3,569,315 | 9366 |
| 100k33-06 | 3,569,198 . . . 3,580,065 | 10868 |
| 100k33-07 | 3,579,946 . . . 3,589,870 | 9925 |
| 100k33-08 | 3,589,750 . . . 3,598,037 | 8288 |
| 100k33-09 | 3,597,917 . . . 3,608,905 | 10989 |
| 100k33-10 | 3,608,783 . . . 3,621,964 | 13182 |
| 100k33-11 | 3,621,843 . . . 3,631,892 | 10050 |
| 100k34-01 | 3,631,790 . . . 3,639,310 | 7521 |
| 100k34-02 | 3,639,199 . . . 3,648,860 | 9662 |
| 100k34-03 | 3,648,743 . . . 3,659,291 | 10549 |
| 100k34-04 | 3,659,171 . . . 3,667,138 | 7968 |
| 100k34-05 | 3,667,024 . . . 3,676,694 | 9671 |
| 100k34-06 | 3,676,571 . . . 3,684,078 | 7508 |
| 100k34-07 | 3,683,940 . . . 3,692,892 | 8953 |
| 100k34-08 | 3,692,772 . . . 3,702,686 | 9915 |
| 100k34-09 | 3,702,582 . . . 3,711,607 | 9026 |
| 100k34-10 | 3,711,488 . . . 3,719,178 | 7691 |
| 100k34-11 | 3,719,064 . . . 3,726,219 | 7156 |
| 100k35-01 | 3,726,119 . . . 3,735,813 | 9695 |
| 100k35-02 | 3,735,698 . . . 3,745,893 | 10196 |
| 100k35-03 | 3,745,767 . . . 3,756,900 | 11134 |
| 100k35-04 | 3,756,781 . . . 3,767,315 | 10535 |
| 100k35-05 | 3,767,195 . . . 3,776,515 | 9321 |
| 100k35-06 | 3,776,395 . . . 3,786,445 | 10051 |
| 100k35-07 | 3,786,327 . . . 3,797,101 | 10775 |
| 100k35-08 | 3,796,976 . . . 3,806,009 | 9034 |
| 100k35-09 | 3,805,910 . . . 3,815,399 | 9490 |
| 100k35-10 | 3,815,281 . . . 3,823,285 | 8005 |
| 100k35-11 | 3,823,166 . . . 3,832,032 | 8867 |
| 100k35-12 | 3,831,909 . . . 3,837,828 | 5920 |
| 100k36-01 | 3,837,736 . . . 3,847,670 | 9935 |
| 100k36-02 | 3,847,551 . . . 3,856,620 | 9070 |
| 100k36-03 | 3,856,499 . . . 3,865,869 | 9371 |
| 100k36-04 | 3,865,746 . . . 3,874,026 | 8281 |
| 100k36-05 | 3,873,919 . . . 3,880,887 | 6969 |
| 100k36-06 | 3,880,768 . . . 3,891,155 | 10388 |
| 100k36-07 | 3,891,032 . . . 3,899,094 | 8063 |
| 100k36-08 | 3,898,973 . . . 3,909,104 | 10132 |
| 100k36-09 | 3,908,980 . . . 3,916,124 | 7145 |
| 100k36-10 | 3,916,005 . . . 3,926,250 | 10246 |
| 100k36-11 | 3,926,131 . . . 3,933,174 | 7044 |
| 100k36-12 | 3,933,053 . . . 3,942,133 | 9081 |
| 100k36-13 | 3,942,027 . . . 3,948,320 | 6294 |
| 100k37-01 | 3,948,216 . . . 3,958,890 | 10675 |
| 100k37-02 | 3,958,767 . . . 3,967,811 | 9045 |
| 100k37-03 | 3,967,690 . . . 3,977,596 | 9907 |
| 100k37-04 | 3,977,471 . . . 9193 | 10660 |
| 100k37-05 | 9077 . . . 15,244 | 6168 |
| 100k37-06 | 15,125 . . . 22,052 | 6928 |
| 100k37-07 | 21,933 . . . 29,499 | 7567 |
| 100k37-08 | 29,374 . . . 36,759 | 7386 |
| 100k37-09 | 36,643 . . . 45,184 | 8542 |
| 100k37-10 | 45,085 . . . 53,037 | 7953 |
| 100k37-11 | 52,911 . . . 61,413 | 8503 |
| 100k37-12 | 61,285 . . . 70,337 | 9053 |
| 100k37-13 | 70,221 . . . 78,586 | 8366 |
| 100k37-14 | 78,465 . . . 83,922 | 5458 |

TABLE 3
Table of BAC Assemblies Success rate of BAC assembly in yeast, followed by transformation into E. coli and verification by NGS.

| | | Yeast | | | E. coli |
|---|---|---|---|---|---|
| | | # of | # of | Genotyped | Sequence |
| | | 10kb | junctions | clones | verified BACs |
| Section | Fragment | stretches | genotyped | (correct/total) | (correct/total) |
| H | 1 | 10 | 8 | 4/4 | 4/4 |
| | 2 | 12 | 7 | 17/23 | 5/11 |
| | 3 | 13 | 0 | 1/1 | 1/1 |
| A | 4 | 10 | 11 | 7/30 | 2/3 |
| | 5 | 10 | 5 | 23/24 | 2/4 |
| | 6 | 11 | 7 | 6/15 | 1/4 |
| | 7 | 10 | 2 | 16/24 | 1/4 |
| | 8 | 9 | 6 | 13/15 | 1/6 |
| B | 9 | 12 | | | 5/8 |
| | 10 | 10 | 5 | 9/22 | 1/4 |
| | 11 | 10 | 6 | 8/8 | 1/4 |
| | 12 | 11 | 12 | 3/4 | 1/3 |
| | 13 | 11 | 6 | 11/22 | 6/11 |
| C | 14 | 12 | 7 | 12/12 | 4/4 |
| | 15 | 11 | 7 | 11/12 | 4/4 |
| | 16 | 11 | | | 4/4 |
| | 17 | 10 | 6 | 9/15 | 3/4 |
| | 18 | 10 | 11 | 7/8 | 1/7 |
| D | 19 | 11 | 12 | 4/24 | 1/3 |
| | 20 | 9 | | | 1/3 |
| | 21 | 11 | 12 | 3/16 | 3/3 |
| | 22 | 11 | 10 | 3/24 | 2/3 |
| | 23 | 10 | 11 | 4/11 | 2/4 |
| E | 24 | 10 | 11 | 11/11 | 3/4 |
| | 25 | 10 | 10 | 5/24 | 1/3 |
| | 26 | 12 | 11 | 6/7 | 4/4 |
| | 27 | 12 | 5 | 8/24 | 3/5 |
| | 28 | 13 | 9 | 4/24 | 1/4 |
| F | 29 | 12 | 13 | 8/24 | 1/8 |
| | 30 | 12 | 9 | 6/22 | 1/1 |
| | 31 | 12 | 12 | 7/8 | 6/8 |
| | 32 | 9 | 9 | 8/24 | 1/4 |
| G | 33 | 12 | 13 | 6/32 | 2/4 |
| | 34 | 11 | 12 | 8/24 | 3/5 |
| | 35 | 12 | 7 | 5/24 | 2/3 |
| | 36 | 13 | 14 | 4/48 | 1/1 |
| H | 37 | 14 | 1 | 0/56 | |
| | 37a | 7 | 7 | 10/16 | 3/3 |
| | 37b | 7 | 7 | 1/16 | 1/1 |

TABLE 4
Table of REXER experiments
Individual or sequential integration of synthetic fragments into the genome by REXER. The
table indicates the success rate of each integration, and details which spacers and markers
that were employed.
Individual REXER

| | | | | | | Markers | | |
|---|---|---|---|---|---|---|---|---|
| | | | | | | 3′ to | | |
| | | recorded/ | Spacers | | | synthetic | | |
| Sect. | Frag. | total | Lin | Circ | 2nd gen | DNA | on BAC | Comments |
| H | 1 | 0/6, (2/7)** | | | x | sacB-CmR | rpsL | **After altering refactoring of ftsl-murE |
| | 2 | 1/5 | x | | | rpsL-KanR | pheS*-HygR | and recoding of map. |
| | 3 | 1/1 | x | | | sacB-CmR | rpsL | |
| A | 4 | 1/6 | | x | | rpsL-KanR | sacB | |
| | 5 | 3/6 | | x | | sacB-CmR | rpsL | |
| | 6 | | | | | rpsL-KanR | pheS*-HygR | |
| | 7 | 3/6 | x | | | sacB-CmR | rpsL | |
| | 8 | | | | | rpsL-KanR | pheS*-HygR | |
| B | 9 | | | | | sacB-CmR | rpsL | |
| | 10 | | | | | rpsL-KanR | pheS*-HygR | |
| | 11 | 1/2 | x | | | sacB-CmR | rpsL | |
| | 12 | 2/4 | x | | | rpsL-KanR | pheS*-HygR | |
| | 13 | 2/4 | x | | | sacB-CmR | rpsL | |
| C | 14 | 5/8 | x | | | rpsL-KanR | sacB | |
| | 15 | | | | | sacB-CmR | rpsL | |
| | 16 | | | | | rpsL-KanR | pheS*-HygR | |
| | 17 | | | | | sacB-CmR | rpsL | |
| | 18 | 1/2 | x | | | rpsL-KanR | sacB | |
| D | 19 | 7/9 | x | | | sacB-CmR | rpsL | |
| | 20 | | | | | rpsL-KanR | sacB | |
| | 21 | 3/5 | x | | | sacB-CmR | rpsL | |
| | 22 | 6/6 | x | | | rpsL-KanR | pheS*-HygR | |
| | 23 | 6/6 | x | | | sacB-CmR | rpsL | |
| E | 24 | 2/7 | x | | | rpsL-KanR | pheS*-HygR | |
| | 25 | 1/3 | x | | | sacB-CmR | rpsL | |
| | 26 | 2/3 | x | | | rpsL-KanR | pheS*-HygR | |
| | 27 | 1/8 | x | | | sacB-CmR | rpsL | Point mutation in non-essential gene |
| | 28 | 2/7 | x | | | rpsL-KanR | pheS*-HygR | Point mutation in non-essential gene, |
| | | | | | | | | introducing STOP codon |
| F | 29 | 6/6 | x | | | sacB-CmR | rpsL | |
| | 30 | | | | | rpsL-KanR | pheS*-HygR | |
| | 31 | 2/5 | x | | | sacB-CmR | rpsL | |
| | 32 | | | | | rpsL-KanR | pheS*-HygR | |
| G | 33 | 4/8 | x | | | sacB-CmR | rpsL | |
| | 34 | 3/5 | x | | | rpsL-KanR | pheS*-HygR | |
| | 35 | | | | | sacB-CmR | rpsL | |
| | 36 | | | | | rpsL-KanR | pheS*-HygR | |
| H | 37a | 0/6, | | | x | sacB-CmR | rpsL | #After recoding of yaaY |
| | | (1/7)# | | | | rpsL-KanR | pheS*-AprR | Point mutation in non-essential gene |
| | 37b | 3/6 | x | | | | | |

Sequential REXER

| | | | | | | | Markers | | |
|---|---|---|---|---|---|---|---|---|---|
| | | | Spacers | | | | 3′ to | | |
| | | recorded/ | | | 2nd | 2nd gen | synthetic | | |
| Sect. | Frag. | total | Lin | Circ | gen | REXER4 | DNA | on BAC | Comments |
| H | 1 | | | | | | sacB-CmR | rpsL | |
| | 2 | 2/7 | | | x | | rpsL-KanR | pheS*-HygR | |
| | 3 | 3/5 | | | x | | sacB-CmR | rpsL | |
| A | 4 | | | | | | rpsL-KanR | sacB | |
| | 5 | 3/6 | x | | | | sacB-CmR | rpsL | |
| | 6 | 4/6 | x | | | | rpsL-KanR | pheS*-HygR | |
| | 7 | 5/8 | x | | | | sacB-CmR | rpsL | |
| | 8 | 3/6 | x | | | | rpsL-KanR | pheS*-HygR | |
| B | 9 | 0/29, | x | | | | sacB-CmR | rpsL | #After altering recoding of yceQ. |
| | | (4/5)# | | | | | | | |
| | 10 | 1/8 | x | | | | rpsL-KanR | pheS*-HygR | |
| | 11 | 2/6 | x | | | | sacB-CmR | rpsL | |
| | 12 | 1/6 | — | — | — | — | rpsL-KanR | pheS*-HygR | Conjugated into 4-11 from individual |
| | | | | | | | | | 100k12 strain |
| | 13 | 7/8 | x | | | | sacB-CmR | rpsL | |
| C | 14 | | | | | | rpsL-KanR | sacB | |
| | 15 | 3/5 | x | | | | sacB-CmR | rpsL | |
| | 16 | 4/9 | x | | | | rpsL-KanR | pheS*-HygR | |
| | 17 | 4/8 | x | | | | sacB-CmR | rpsL | |
| | 18 | 5/10 | x | | | | rpsL-KanR | sacB | |
| D | 19 | | | | | | sacB-CmR | rpsL | |
| | 20 | 3/4 | | | | x | rpsL-KanR | sacB | 3rd gen REXER4 |
| | 21 | 1/7 | x | | | | sacB-CmR | rpsL | Required Streptomycin at 4000 ug/mL |
| | 22 | 6/6 | x | | | | rpsL-KanR | pheS*-HygR | |
| | 23 | 4/6 | x | | | | sacB-CmR | rpsL | |
| E | 24 | | | | | | rpsL-KanR | pheS*-HygR | |
| | 25 | 2/6 | x | | | | sacB-CmR | rpsL | |
| | 26 | 4/6 | x | | | | rpsL-KanR | pheS*-HygR | |
| | 27 | 3/6 | x | | | | sacB-CmR | rpsL | |
| | 28 | 3/8 | | x | | | rpsL-KanR | pheS*-HygR | |
| F | 29 | | | | | | sacB-CmR | rpsL | |
| | 30 | 2/3 | x | | | | rpsL-KanR | pheS*-HygR | |
| | 31 | 2/10 | x | | | | sacB-CmR | rpsL | |
| | 32 | 4/4 | x | | | | rpsL-KanR | pheS*-HygR | |
| G | 33 | | | | | | sacB-CmR | rpsL | |
| | 34 | 1/8 | x | | | | rpsL-KanR | pheS*-HygR | |
| | 35 | 6/6 | x | | | | sacB-CmR | rpsL | |
| | 36 | 3/7 | x | | | | rpsL-KanR | pheS*-HygR | |
| H | 37a | | | | | | sacB-CmR | rpsL | |
| | 37b | 3/5 | x | | | | rpsL-KanR | pheS*-AprR | |

### Example 3

### Identifying and Repairing Design Flaws

[0308] Sequencing several clones following REXER allows us to score the frequency with which each target codon is recoded and thereby compile a recoding landscape for the genomic region. From the recoding landscape with fragment 1 we directly identified the fourth codon (Ser4, TCA) in map, an essential gene encoding methionine amino peptidase, as recalcitrant to recoding by our defined scheme (FIG. 5a). We also identified a second region, which encompasses a 14 bp overlap of the essential genes ftsl and murE, and several serine codons in ftsl and murE, which was not replaced by our recoded and refactored sequence. Since we have previously recoded this region with the same recoding scheme, when duplicating the overlap plus 182 bp rather than the 20 bp used here (Wang, K. et al., 2016. Nature 539, 59-64) (FIG. 1c), we conclude that the defect in the synthetic DNA for this region is in its refactoring rather than in its recoding. REXER with a new fragment 1 BAC, which contained both the extended refactoring (FIG. 5b) and a TCA to TCT mutation at Ser4 in map (FIG. 5c, Table 5) enabled complete recoding of the targeted 100 kb region of the genome (FIG. 5d).

[0309] From the post-REXER recoding landscape for fragment 9 we identified a 26 kb genomic region that was never recoded (FIG. 6). Efforts to delete 10 kb regions of the genome within and around this region, in the presence of a BAC containing recoded fragment 9, narrowed down the region that was challenging to recode to 10 kb of the genome. REXER across the 10 kb genomic-region revealed a minimum within the resulting recoding landscape at yceQ.

[0310] This identified the five target codons within yceQ as problematic to recode. Similarly, the recoding landscape following REXER with fragment 37a, followed by further sequencing allowed us to identify a single codon at the 3′ end of yaaY, which was never recoded (FIG. 7).

[0311] yceQ and yaaY both encode ‘predicted proteins’, multiple insertions in yceQ are viable, and there is no evidence of mRNA production and/or protein synthesis from these predicted genes (Pundir, S., et al., 2017. Methods Mol Biol 1558, 41-55). Notably, the codons that are recalcitrant to recoding within yceQ and yaaY all lie within the 5′ untranslated regions (UTRs) of essential genes. We suggest that the sequence changes introduced by recoding yceQ and yaaY negatively affect the regulation of the adjacent essential genes. Indeed, the target codons in yceQ map to RNA secondary structures and promoter elements within the 5′UTR of me (encoding the essential ribonuclease RNase E) (FIG. 8) and these sequences are essential for controlling RNAse E homeostasis (Schuck, A., et al. 2009. Mol Microbiol 72, 470-478).

[0312] We fixed fragment 9 by introducing a stop codon into the 5′ sequence of yceQ; this minimizes any potential translation but retains the native sequence for regulating me transcription (FIG. 6, Table 5). REXER with this new BAC, led to complete recoding of the corresponding 100 kb genomic-region (FIG. 6, Table 5). REXER with a new BAC, containing fragment 37a with a TCA to AGC substitution at the problematic codon in yaaY, led to complete recoding of the corresponding region of the genome (FIG. 7, Table 5).

[0313] Having pinpointed and fixed all the initially problematic sequences we completed the assembly of a strain in which sections A and B are fully recoded (FIG. 9), and the assembly of a strain in which section H is entirely recoded (Table 5, FIG. 9). This completed the assembly of all the sections in seven distinct strains.

TABLE 5
Alternative recoding mutagenesis-oligos
Table of oligonucleotides used for site directed mutagenesis approaches to identify alternative viable recoding solutions.

| | Target | | | | |
|---|---|---|---|---|---|
| Frag. | gene | Purpose | Oligo F (5′→3′) | Oligo R (5' 3') | Template |
| 1 | ftsl-murE | Integrate | aaaatgaatttgtgattaatcaaggcgaggggacaggtggcag | gcgtctggcacccacggagcaagaaggtcgcgcaaattacgat | pheS*-HygR |
| | | pheS*- | aagctaaAAGCTTGAGCACGTGTTGACAATTAATCAT | ctgccacTTATTCCTTTGCCCTCGGACGAGTGC | |
| | | HygR | CGG (SEQ ID NO: 327) | TGG (SEQ ID NO: 328) | |
| 1 | ftsl-murE | Ser4 AGT | Aaaaaggtcgggccggacggtc (SEQ ID NO: 329) | gcaataatggcagccacaccttg (SEQ ID NO: 330) | Synthetic DNA |
| | | | | | Ser r.s.3 |
| | | | | | (Wang et al., |
| | | | | | Nature 2016) |
| 1 | map | Integrate | gcgacgcgcattttttcgatatcttctggggtcttgatTGAga | ggcacttacatatatattgtcggtatcaccgacgctgatggacag | pheS*-HygR |
| | | pheS*- | tagccatGATTGTCCTCCTTATTCCTTTGCCCTCGGACGA | aattaAAGCTTGAGCACGTGTTGACAATTAATC | |
| | | HygR | GTGCTGG (SEQ ID NO: 331) | ATCGG (SEQ ID NO: 332) | |
| 1 | map | Ser4 AGT | cacttcggcagccagtcggccagcgacgcgcattttttcgata | taacgggtctggtgaccgaagtgaac (SEQ ID NO: 334) | MDS42 wt |
| | | | tcttctggggtcttgatACTgatagccattaattctgtccatc | | |
| | | | agcgtcggtgataccgac (SEQ ID NO: 333) | | |
| 1 | map | Ser4 AGC | cacttcggcagccagtcggccagcgacgcgcattttttcgata | taacgggtctggtgaccgaagtgaac (SEQ ID NO: 336) | MDS42 wt |
| | | | tcttctggggtcttgatGCTgatagccattaattctgtccatc | | |
| | | | agcgtcggtgataccgac (SEQ ID NO: 335) | | |
| 1 | map | Ser4 TCT | cacttcggcagccagtcggccagcgacgcgcattttttcgata | taacgggtctggtgaccgaagtgaac (SEQ ID NO: 338) | MDS42 wt |
| | | | tcttctggggtcttgatAGAgatagccattaattctgtccatc | | |
| | | | agcgtcggtgataccgac (SEQ ID NO: 337) | | |
| 1 | map | Ser4 TCC | cacttcggcagccagtcggccagcgacgcgcattttttcgata | taacgggtctggtgaccgaagtgaac (SEQ ID NO: 340) | MDS42 wt |
| | | | tcttctggggtcttgatGGAgatagccattaattctgtccatc | | |
| | | | agcgtcggtgataccgac (SEQ ID NO: 339) | | |
| 1 | map | Ser4 ACA | cacttcggcagccagtcggccagcgacgcgcattttttcgata | taacgggtctggtgaccgaagtgaac (SEQ ID NO: 342) | MDS42 wt |
| | | | tcttctggggtcttgatTGTgatagccattaattctgtccatc | | |
| | | | agcgtcggtgataccgac (SEQ ID NO: 341) | | |
| 1 | map | Ser4 TTA | cacttcggcagccagtcggccagcgacgcgcattttttcgata | taacgggtctggtgaccgaagtgaac (SEQ ID NO: 344) | MDS42 wt |
| | | | tcttctggggtcttgatTAAgatagccattaattctgtccatc | | |
| | | | agcgtcggtgataccgac (SEQ ID NO: 343) | | |
| 9 | yceQ | Integrate | gtcgcgtcgccaacctcacggttatcgtcagctcaaagaggcg | tgataaatggtaaaagtcatcttgctataacaaggcttgcagtgga | pheS*-HygR |
| | | pheS*- | cagagtgAAGCTTGAGCACGTGTTGACAATTAATCAT | ataaTTATTCCTTTGCCCTCGGACGAGTGCTG | |
| | | HygR | CGG (SEQ ID NO: 345) | G (SEQ ID NO: 346) | |
| 9 | yceQ | Ser2 TGA, | ctcgtgtctagtcgcgtcgccaacctcacggttatcgtcagct | caccagcaagaagtgaaaaaactgtgagtaagc (SEQ ID | MDS42 wt |
| | | Ser7 + 15 + | gcaaagagcgcagagtgTGAgttgcccgTTTtTCAtgcggaaa | NO: 348) | |
| | | 57 + 78 WT | aacagcgcaattaTCAaaga (SEQ ID NO: 347) | | |
| 37a | yaaY | Integrate | tgattagcgtactcaatcgccggttaaccttgaccgctgtaca | agattatgtatgccgcgtatcagcttcatgtctggctcaaaacagT | pheS*-HygR |
| | | pheS*- | aggtataAAGCTTGAGCACGTGTTGACAATTAATCATCG | GAaaatcgtccgagTTATTCCTTTGCCCTCGGAC | |
| | | HygR | G (SEQ ID NO: 349) | GAGTGCTGG (SEQ ID NO: 350) | |
| 37a | yaaY | Ser70 AGC | aaaggtgaagacaaagccgctatcgaag (SEQ ID | ggctgagattatgtatgccgcgtatcagcttcatgtctggctcaaa | Partially recoded |
| | | | NO: 351) | acagGCTaaatcgtccgagtataccttgtacagcggtcaaggtt | clone |
| | | | | aac (SEQ ID NO: 352) | |
| 37a | yaaY | Ser70 AGT | aaaggtgaagacaaagccgctatcgaag (SEQ ID | ggctgagattatgtatgccgcgtatcagcttcatgtctggctcaaa | Partially recoded |
| | | | NO: 353) | acagACTaaatcgtccgagtataccttgtacagcggtcaaggtt | clone |
| | | | | aac (SEQ ID NO: 354) | |
| 37a | yaaY | Ser70 TCC | aaaggtgaagacaaagccgctatcgaag (SEQ ID | ggctgagattatgtatgccgcgtatcagcttcatgtctggctcaaa | Partially recoded |
| | | | NO: 355) | acagGGAaaatcgtccgagtataccttgtacagcggtcaaggt | clone |
| | | | | taac (SEQ ID NO: 356) | |
| 37a | yaaY | Ser70 TCG | aaaggtgaagacaaagccgctatcgaag (SEQ ID | ggctgagattatgtatgccgcgtatcagcttcatgtctggctcaaa | Partially recoded |
| | | | NO: 357) | acagCGAaaatcgtccgagtataccttgtacagcggtcaaggt | clone |
| | | | | taac (SEQ ID NO: 358) | |
| 37a | yaaY | Ser70 TCT | aaaggtgaagacaaagccgctatcgaag (SEQ ID | ggctgagattatgtatgccgcgtatcagcttcatgtctggctcaaa | Partially recoded |
| | | | NO: 359) | acagAGAaaatcgtccgagtataccttgtacagcggtcaaggtt | clone |
| | | | | aac (SEQ ID NO: 360) | |

### Example 4

### Assembly of a Recoded Genome

[0314] We developed a conjugation-based strategy (Isaacs, F. J. et al., 2011. Science 333, 348-353; Ma, N. J., et al., 2014. Nat Protoc 9, 2285-2300; and Lederberg, J. & Tatum, E. L., 1946. Nature 158, 558) to assemble the recoded sections into a single genome. Our strategy assembles the recoded genome in a clockwise manner by conjugating recoded ‘donor’ sections, containing the origin of transfer (oriT), into their adjacent recoded ‘recipient’ sections, that have been extended to provide homology to the donor (FIG. 10, FIG. 11a, FIG. 22a,b). This generates a new genome that contains the recoded sections of both the donor and the recipient. The cells containing this new genome can then be used as a recipient for the next recoded donor, and iteration of the process enables the recoded genome to be assembled through the addition of recoded sections to an increasingly recoded recipient (FIG. 10, FIG. 11a,b). Donor cells contained a version of the F′ plasmid that facilitates transfer of the donor genome to the recipient cells but, unlike standard F′ plasmids, is not competent to transfer itself to recipient cells (FIG. 22c); as a result this F′ plasmid does not have to be lost from the recipient cells after every conjugation. This accelerated our workflow.

[0315] We initiated conjugation by mixing donor and recipient cells, and varied the time and conditions of conjugation to control the extent of genome transfer from the donor to the recipient. Following conjugation between the donor and the recipient cells, we selected for recipient cells, and then for those recipients that had gained the positive marker at the end of the recoded sequence from the donor, and lost the negative marker at the end of the extension in the recipient (FIG. 11a).

[0316] We performed a convergent synthesis of a genome recoded through sections A-E (FIG. 10, FIG. 11b). We then used the A-E strain as a recipient for F, generating a recoded strain, A-F. A-F was then used as a recipient for F-G, generating A-G; this conjugation used a much longer shared recoded sequence (0.4 Mb) between the donor and recipient strains to increase conjugation efficiency.

[0317] To create a completely recoded genome we first created a recipient strain by introducing 37a and 37b into A-G to create A-G-37ab (providing a 115 kb homology region with the final donor). We created the final donor strain by conjugation between strain H and strain AB, which yielded strain H-A-09, in which H, A and fragment 9 from section B are recoded (FIG. 10, FIG. 11b). The additional sequence from A and B was added to H to ensure that we did not erase the recoding in A in the final conjugation. The final conjugation between the H-A-09 donor strain and A-G-37ab recipient strain led to the synthesis of E. coli, which we name E.coli Syn61, in which all 1.8×10⁴ target codons in the genome are recoded (FIG. 19, SEQ ID NO: 2). The synthesis of our recoded genome introduced only eight non-programmed mutations (Table 6); four of these mutations arose during the preparation of the 100 kb BACs, and four during the recoding process.

TABLE 6
Differences between initial design and Syn61 sequence
Table of design optimizations and non-programmed mutations. At 7 target codons we could not implement our defined recoding scheme. For
the final genome we found viable alternative codons that were in accordance with our recoding scheme and a refactoring solution for a
problematic recoding area in fragment 1. Additionally, we assembled 8 single nucleotide mutations in the final genome,
which arose either in preparation of the 100 kb BACs or during recoding.
Design optimisations

| Section | Fragment | Position* | Original design | Final genome | Consequence | Origin |
|---|---|---|---|---|---|---|
| H | 37a | 16,213 | AGT | AGC | Viable recoding of S70 in yaaY | |
| H | 1 | 88,037 | 1 nt + TAA + 20 nt | 4 nt + TGA + 182 nt | Viable separation of ftsl and murE | |
| H | 1 | 178,509 | AGT | TCT | Viable recoding of S4 in map | |
| B | 9 | 976,671 | AGC | TGA | Disruption of pseudogene yceQ to | |
| | | 976,686 | AGT | TCA | preserve viable expression of me | |
| | | 976,710 | AGT | TCA | | |
| | | 976,836 | AGC | TCG | | |
| | | 976,899 | AGT | TCA | | |

Non-programmed mutations

| | | | | | | |
|---|---|---|---|---|---|---|
| H | 37b | 53,145 | G | A | Intergenic region | In DNA synthesis or BAC assembly |
| C | 15 | 1,579,495 | C | T | D434D in sdaA (non-essential gene) | In DNA synthesis or BAC assembly |
| D | 21 | 2,288,863 | T | — | Deletion in yfiL (non-essential | During recoding |
| | | | | | gene) | |
| E | 27 | 2,885,875 | A | G | T369A in acrF (non-essential gene) | In transfer from DH10b to MDS42 |
| E | 28 | 3,031,081 | C | A | S119l in gntK (non-essential gene) | In DNA synthesis or BAC assembly |
| F | 30 | 3,252,858 | T | C | S10S in gmK (essential gene) | During recoding |
| F | 30 | 3,252,920 | A | G | Y31C in gmK (essential gene) | During recoding |
| F | 30 | 3,319,703 | A | G | Intergenic region | During recoding |

*Position in designed genome (Supplementary data 2).

### Example 5

### Consequences of Synonymous Codon Compression in Syn61

[0318] Syn61 doubled only 1.6 times slower than MDS42 in LB plus glucose at 37° C., and this ratio increased at 25° C., and decreased at 42° C. (FIG. 13a). Syn61 contains 65% more AGT and AGC codons than MDS42, but providing additional copies of serV, the tRNA that decodes these codons (FIG. 12a), did not increase growth (FIG. 13a); this suggests serV is not limiting. Imaging Syn61 cells suggests they are slightly longer than MDS42 (FIG. 13b,c). The proteome of Syn61 was comparable to that of MDS42 (FIG. 13d). Co-translational incorporation of a non-canonical amino acid, using an orthogonal aminoacyl-tRNA synthetase/tRNA_{CGA} pair, targeted to TCG codons was extremely toxic in MDS42, but completely non-toxic in Syn61; providing phenotypic validation for the removal of TCG codons in Syn61 (FIG. 12b). This approach also provided additional insights (FIG. 14a,b,c). serT, encoding tRNA^{Ser}_{UGA}, is the only tRNA that decodes TCA codons in E. coli, and is therefore essential. Since Syn61 does not contain TCA codons serT should be dispensable in our strain. Indeed we demonstrated that we could easily remove serT (FIG. 12c, FIG. 14d, FIG. 23), as well as serU and prfA, in Syn61 (FIG. 14e,f, FIG. 23). These data provide functional confirmation that we have removed the target codons from the genome, show that the tRNAs and release factor that decode the target codons can be removed in Syn61, and demonstrate unique properties of Syn61 that arise from recoding.

### Example 6

### Discussion

[0319] We have created E. coli in which we have replaced the entire 4 Mb genome with synthetic DNA; the scale of genomic replacement in our experiments is approximately 4 times larger than previously reported for genome replacement in mycoplasma or chromosome replacement in a single strain of S. cerevisiae (FIG. 15a).

[0320] We have demonstrated the genome-wide removal of all known, 1.8×10⁴, target codons (two sense codons, TCG and TCA, the amber codon, TAG) in a single strain of E. coli. Our work removes 60 times more codons than experiments removing the amber stop codons by site-directed mutagenesis (FIG. 15b). Moreover, it demonstrates complete, and genome-wide, recoding of all targeted sense codons (FIG. 15b). Thus, we have created a synthetic organism that uses 61 codons instead of the normal 64. The new organism uses a reduced number of sense codons to encode the 20 canonical amino acids.

[0321] Our synthetic genome contains only 2×10⁻⁴ non-programmed mutations per target codon (FIG. 15c). This compares favorably to 1.05 non-programmed mutations per target codon reported for replacing the amber codons by site-directed mutagenesis methods (Lajoie, M. J. et al., 2013. Science 342, 357-360) (FIG. 15c).

[0322] Our final synthetic genome was recoded using defined refactoring and recoding schemes; using a recoding rule we previously determined on just 83 (0.43%) of the target codons in the genome (Wang, K. et al. 2016. Nature 539, 59-64). The recoding rule worked at 99.9% of the 1.8×10⁴ target codons in the genome, while the refactoring rules worked at 99% of overlaps.

[0323] Corrections to our initial recoding scheme were necessary at just seven of the 1.8×10⁴ target codons in the whole genome. While one of these codons was in an essential gene the other six were within the 5′ UTRs of essential genes. Thus, all but one of the changes to our defined recoding scheme correct for unintended alterations to the 5′ UTRs of essential genes, rather than for direct effects of altered synonyms on translation.

[0324] The strategies we have developed for disconnecting a designed genome into sections, fragments, and stretches, and realizing the design through the convergent, seamless and robust integration of REXER, GENESIS and directed conjugation, provides a blueprint for future genome syntheses. In future work we will further characterize the consequences of synonymous codon compression in E. coli Syn61, and test additional recoding schemes in E. coli and other organisms. In addition we will test sense codon reassignment for non-canonical biopolymer synthesis.

### Example 7

### Methods

[0325] Recoded Genome Design

[0326] We based our synthetic genome design on the sequence of the E. coli MDS42 genome (accession number AP012306.1, released 07-Oct.-2016), which has 3547 annotated CDS. We manually curated the starting genome annotation to remove three CDS and add another twelve. The three predicted CDS removed were htgA, ybbV, and yzfA; there is no evidence that these sequences encode proteins (Pundir, S., et al., 2017. Methods Mol Biol 1558, 41-55), and these sequences completely or largely overlap with better characterised genes, which would make it difficult to recode them without disrupting their overlapping genes or creating large repetitive regions. Conversely, the pseudogenes ydeU, ygaY, pbi, yghX, yghY, agaW, yhiK, yhjQ, rph, ysdC, glvG, and cybC were promoted to CDS. To enable negative selection with rpsL, we mutated the genomic copy of rpsL to rpsL^{K43R}. Finally, deep sequencing of our in-house MDS42 revealed a 51 bp insertion between mrcB and hemL which had not been reported in AP012306.1. We manually introduced and annotated this insertion in our starting genome sequence.

[0327] We produced a custom Python script that i) identifies and recodes all target codons, and ii) identifies and resolves overlapping gene sequences that contain target codons. From our curated MDS42 starting sequence, we used the script to generate a new synthetic genome in which all TCG, TCA and TAG codons were replaced with AGC, AGT and TAA respectively. The script reported 91 CDS with overlaps containing target codons. In 33 instances, genes were overlapping tail-to-tail (3′, 3′) (Table 1); 12 of these could be recoded by introducing a silent mutation in the overlapping gene, while the remaining 21 were duplicated to separate the genes (FIG. 1 b). 58 instances of genes overlapping head-to-tail (5′, 3′) were resolved by duplicating the overlap plus 20 bp of upstream sequence to allow endogenous expression of the downstream gene (FIG. 1c). For overlaps longer than 1 bp, an in-frame TAA was introduced to terminate expression from the original RBS for the downstream gene. prfB (release-factor RF-2) was not annotated as a CDS in our starting MDS42 genome due to its regulatory internal stop codon, and we therefore recoded all the target codons in the gene manually, thereby maintaining the internal stop codon. The resulting genome design contained 3556 CDS with 1,156,625 codons of which 18,218 were recoded (FIG. 18, SEQ ID NO: 1).

[0328] Retrosynthesis of Recoded Stretches

[0329] We divided the designed genome into 37 fragments of between 91 and 136 kb. We chose the boundary sequences that delimit these fragments so that: i) they consist of a 5′-NGG-3′ PAM to allow REXER4 to be used for integration if necessary, ii) the PAM does not sit within 50 bp of a target codon, iii) the PAM is in-between non-essential genes and iv) the PAM does not disturb any annotated features such as promoters. We called the regions ˜50-100 bp upstream and downstream of these boundaries ‘landing sites’, and these are annotated as Lxx, where xx is the number of the upstream fragment, e.g. LO1 is the landing site between fragment 1 and 2. In our design, a landing site sequence is contained in the 3′ end of a fragment and the 5′ end of the next—as a result all 37 fragments contain overlapping homologies of 54-155 bp with their neighbouring fragment.

[0330] Each fragment was further broken down to 7-14 stretches of 4-15 kb. We designed the stretches so that they contain overlaps of 80-200 bp with each other, and the overlap regions were defined at intergenic regions free of any recoding targets. A total of 409 stretches were synthesised (GENEWIZ, USA) and supplied in pSC101 or pST vectors flanked by Bsal, Avrll, Spel, or Xbal restriction sites. The synthetic stretches naturally did not contain at least one of these restriction sites.

[0331] Construction of Selection Cassettes and Plasmids for REXER/GENESIS

[0332] The cloning procedures described in this section were performed in E. coli DH10b, which is resistant to streptomycin by virtue of an rpsLK43R mutation. The plasmid pKW20_CDFtet_pAraRedCas9_tracrRNA used throughout this study encodes Cas9 and the lambda-red recombination components alpha/beta/gamma under the control of an arabinose-inducible promoter, as well as a tracrRNA under its native promoter, as previously described (Wang, K. et al., 2016. Nature 539, 59-64).

[0333] The protospacers for REXER are encoded in the plasmid pKW1_MB1_{Amp_}Spacer (FIG. 21a), which contains a pMB1 origin of replication, an ampicillin resistance marker and the protospacer array under the control of its endogenous promoter as previously described (Wang, K. et al., 2016. Nature 539, 59-64). From this plasmid we constructed the derivative pKW3_MB1_{Amp_}Tracr^{K}_Spacer (Table 5), which additionally contains a tracrRNA upstream of the protospacer array. For this we introduced a PCR product containing tracrRNA with its modified endogenous promoter into the BamHl site of pKW1_MB1_{Amp_}Spacer via Gibson assembly using the NEBuilder HiFi Master Mix. From this plasmid a derivative that additionally encodes Cas9 was constructed, also by Gibson assembly, and named pKW5_MB1_{Amp}_Tracr^{K}_Cas9_Spacer.

[0334] For each REXER step, a derivative of one of these three plasmids was constructed to harbour a protospacer/direct repeat array containing 2 (REXER2) or 4 (REXER4) protospacers, corresponding to the target sequences for cutting the BAC and genome. The different protospacer arrays were constructed from overlapping oligos through multiple rounds of PCR —the products were inserted by Gibson assembly between restriction sites Accl and EcoRl in the backbone of pKW1_MB1_{Am_}Spacer, pKW3_MB1_{Amp_}Tracr^{K}_Spacer or pKW5_MB1_{Amp_}Tracr^{K}_Cas9_Spacer. The protospacer arrays resulting from each assembly were verified to be mutation-free by Sanger sequencing.

[0335] The positive-negative selection cassettes used in in REXER and GENESIS are −1/+1 (rpsL-Kan^{R}), −2/+2 (sacB-Cm_{R}) and −3/+3 (pheS^{T251A_A294G}-Hyg^{R}) −1/+1 and −2/+2 are as previously described (Wang, K. et al., 2016. Nature 539, 59-64). In −3/+3, pheS^{T251A_A294G} is dominant lethal in the presence of 4-chlorophenylalanine, and Hyg^{R} confers resistance to hygromycin. Both proteins are expressed polycistronically under control of the EM7 promoter. The −3/+3 cassette was synthesised de novo. The −3/+3 cassette is also referred to as pheS*/Hyg^{R}.

[0336] Construction of E. coli Strains Containing Double Selection Cassettes at Genomic Landing Sites.

[0337] According to our design, each region of the genome that is targeted for replacement by a synthetic fragment is flanked by an upstream landing site and a downstream landing site; these genomic landing site sequences are the same as the landing site sequences described above. Initiation of REXER/GENESIS requires the insertion of a double selection cassette in the upstream genomic landing site. We inserted double selection cassettes at the landing sites through lambda-red mediated recombination. Briefly, either the sacB-Cm^{R} or the rpsL-Kan^{R} cassettes were PCR amplified with primers containing homology regions to the genomic landing sites of interest. For recombination experiments, we prepared electrocompetent cells as described previously (Wang, K. et al., 2016. Nature 539, 59-64) and electroporated 3 μg of the purified PCR product into 100 μL of MDS42^{rpsLK43R} cells harbouring the pKW20_CDFtet_pAraRedCas9_tracrRNA plasmid expressing the lambda-red alpha/beta/gamma genes. The recombination machinery was induced, under control of the arabinose promoter (pAra), with L-arabinose added at 0.5% for 1 hour starting at OD₆₀₀=0.2. Pre-induced cells were electroporated and then recovered for 1 hour at 37° C. in 4 mL of super optimal broth (SOB) medium. Cells were then diluted into 100 mL of LB medium with 10 μg/mL tetracycline and grown for 4 hours at 37° C., 200 rpm. The cells were subsequently spun down, resuspended in 4 mL of H₂O, serially diluted, plated and incubated overnight at 37° C. on LB agar plates containing 10 μg/mL tetracycline, 18 μg/mL chloramphenicol (for sacB-Cm^{R}) or 50 μg/mL kanamycin (for rpsL-Kan^{R}).

[0338] BAC Assembly and Delivery

[0339] We constructed Bacterial Artificial Chromosomes (BACs) shuttle vectors that contained 97-136 kb of synthetic DNA. On the 5′ side, the synthetic DNA was flanked by a region of homology to the genome (HR1), and a Cas9 cut site. On the 3′ side the synthetic DNA was flanked by a double selection cassette, a region of homology to the genome (HR2), and a second Cas9 cut site. The BAC also contained a negative selection marker, a BAC origin, a URA marker and YAC origin (CEN6 centromere fused to an autonomously replicating sequence (CEN/ARS)) (FIG. 2c, FIG. 20a-c).

[0340] BACs were assembled by homologous recombination in S. cerevisiae. Each assembly combined i) 7-14 stretches of synthetic DNA, each 6-13 kb in length, with ii) a selection construct (see below) and iii) a BAC shuttle vector backbone (FIG. 20a-c, Wang, K. et al., 2016. Nature 539, 59-64).

[0341] Synthetic DNA stretches were excised by digestion with Bsal, Avrll, Spel, or Xbal restriction sites from their source vectors provided by GENEWIZ. In the case of Avrll, Spel, and Xbal, restriction digests were followed by Mung Bean nuclease treatment to remove sticky ends.

[0342] Selection constructs contained a region of homology to the 3′ most stretch of the fragment, a double selection cassette (sacB-Cm^{R} or rpsL-Kan^{g}) a region of homology (HR2) to the targeted genomic locus, a negative selection marker (rpsL, sacB or pheS*-Hyg^{R}) and YAC. For specific double selection cassettes, negative selection markers, and homology region sequences see FIG. 20d. We assembled episomal versions of the selection constructs in a pSC101 backbone from 3 PCR fragments with NEBuilder HiFi DNA Assembly Master Mix. The episomal versions were designed so that restriction digestion with Bsal yielded a DNA fragment for BAC assembly.

[0343] The BAC backbone containing a BAC origin and a URA3 marker was amplified by PCR using a previously described BAC (Wang, K. et al., 2016. Nature 539, 59-64) as a template, and the PCR product used for BAC assembly. The primers used for these PCR assemblies are listed in FIG. 20d.

[0344] To assemble the stretches, selection construct, and BAC backbone, 30-50 fmol of each piece of DNA was transformed into S. cerevisiae spheroplasts; these were prepared as previously described (Kouprina, N.,et al., 2004. Methods Mol Biol 255, 69-89). Following assembly we identified yeast clones potentially harbouring correctly assembled BACs by colony PCR at the junctions of overlapping fragments and vector-insert junctions. Clones that appeared correct by colony PCR were sequence verified by NGS after transformation into E. coli, as described below.

[0345] The assembled BACs were extracted from yeast with the Gentra Puregene Yeast/Bact. Kit (Qiagen) following the manufacturer's instructions. MDS42^{rpsLK43R} cells were transformed with the assembled BAC by electroporation. Due to the large size of the BACs we sometimes observed inefficient electroporation into target cells. Consequently, we introduced an oriT-Apramycin cassette provided as a PCR product with 50 bp homology regions by lambda-red-mediated recombination (as described above) into some BACs post assembly (FIG. 20a-c). This facilitated transfer of BACs, from E. coli that had been successfully transformed, to other strains by conjugation.

[0346] Synthesis of Recoded Sections by REXER and GENESIS

[0347] We used various genomic and plasmid selection markers for sequential REXER experiments (GENESIS) (Table 4). We used an rpsL-Kan^{R} (−1/+1) or sacB-Cm^{R} (−2/+2) cassette at genomic landing sites for selection. We used rpsL-Kan^{R}-sacB (−1/+1,−2), rpsL-Kan^{R}-pheS*-Hyg^{R} (−1/+1,−3/+3) or sacB-Cm^{R}-rpsL (−2/+2,−1) cassettes as episomal selection markers.

[0348] For each REXER, MDS42^{rpsLLK43R} cells containing pKW20_CDFtet_pAraRedCas9_tracrRNA and a double selection cassette at the relevant upstream genomic landing site were transformed with the relevant BAC. We plated cells on LB agar supplemented with 2% glucose, 5 μg/ml tetracycline and antibiotic selecting for the BAC (i.e. 18 μg/ml chloramphenicol or 50 μg/ml kanamycin). We inoculated individual colonies into LB medium with 5 μg/ml tetracycline and the BAC specific antibiotic and grew cells overnight at 37° C., 200 rpm. The overnight culture was diluted in LB medium with 5 μg/ml tetracycline, and the BAC specific antibiotic, to OD600=0.05 and grown at 37° C. with shaking for about 2 h, until OD600≈0.2. To induce lambda-red expression we added arabinose powder to the culture to a final concentration of 0.5% and the incubated the culture for one additional hour at 37° C. with shaking. We harvested the cells at OD600≈0.6, and made the cells electro-competent as described previously (Wang, K. et al., 2016. Nature 539, 59-64).

[0349] For each REXER experiment a linear dsDNA protospacer array was PCR amplified from pKW1_MB1Amp_Spacers using universal primers (FIG. 21a). Approximately 5-10 μg of the resulting Dpnl digested and purified PCR product was transformed into 100 μL electro-competent and induced cells. Cells were recovered in 4 ml SOB medium for 1 h at 37° C. and then diluted to 100 mL LB supplemented with 5 μg/mL tetracycline and antibiotic selecting for the BAC and incubated for another 4 h at 37° C. with shaking. Alternatively, electrocompetent and induced cells were transformed with 5 μg of circular protospacer array (pKW1_MB1Amp_Spacers or pKW3_MB1Amp_Spacers plasmid) and after 1 h recovery in SOB medium at 37° C. transferred into 100 mL LB supplemented with 100 μg/mL ampicillin for another 4 h at 37° C. with shaking (FIG. 21a,b). If REXER2 was not sufficient we performed REXER4 using pKW5_MB1Amp_Spacers plasmid as previously described (Wang, K. et al., 2016. Nature 539, 59-64).

[0350] We spun down the culture and resuspended it in 4 ml Milli-Q filtered water and spread in serial dilutions on selection plates of LB agar with 5 μg/ml tetracycline, an agent selecting against the negative selection marker and an antibiotic selecting for the positive marker originating from the BAC. The plates were incubated at 37° C. overnight. Multiple colonies were picked, resuspended in Milli-Q filtered water, and arrayed on several LB agar plates supplemented with 50 μg/ml kanamycin, 18 μg/ml chloramphenicol, 200 μg/ml streptomycin, 7.5% sucrose or 2.5 mM 4-chloro-phenylalanine. Colony PCR was also performed from resuspended colonies using both a primer pair flanking the genomic locus of the landing site and the position of the newly integrated selection cassette from the BAC. REXER-mediated recombination results in an approximately 500 bp band at the upstream genomic locus with a 2.5 kb (rK-landing site) or 3.5 kb (sC-landing site) band for the control MDS42^{rk}/MDS42^{sC} strain indicating successful removal of the landing site from the genome. Primer pairs flanking the 3′ end of the replaced DNA generate an approximately 2.5 kb (rK selection cassette on pBAC) or 3.5 kb (sC selection cassette on pBAC) band and a 500 bp band for the control MDS42^{rk}/MDS42^{sC} strain indicating successful integration of the selection markers.

[0351] If a plasmid based circular protospacer array was used in the previous REXER experiment the plasmid had to be lost before the next experiment. Thus, a successful clone from the first REXER experiment was grown in LB supplemented with 2% glucose, 5 μg/mL tetracycline and antibiotic selecting for the positive marker in the genome to a dense culture at 37° C. with shaking. 2 μL of the culture were then streaked out on an LB agar plate with the same supplements and incubated at 37° C. overnight. Several colonies were arrayed in replica on LB agar plate and LB agar plate supplemented with 100 μg/mL ampicillin to screen for the loss of the plasmid.

[0352] BAC Editing

[0353] When encountering loss-of-function mutations in a selection cassette on BACs in E. coli, the faulty cassette was replaced with a suitable double selection cassette provided (FIG. 20d) as a PCR-product flanked by 50 bp homology regions and integrated by lambda-red-mediated recombination.

[0354] Changes in the synthetic, recoded sequence of a BAC, either to correct spontaneous mutations or change recoded codons, were introduced by a two-step replacement approach; For BACs containing the selection cassettes −21+2 and −1 in the end of the recoded sequence, the −31+3 cassette was provided as a PCR-product flanked by 50 bp-homology regions targeting the desired locus and integrated by lambda-red-mediated recombination followed by selection for +3. Due to the homology between the recoded DNA and the genome, some of the resulting clones would contain −31+3 on the BAC and some on the genome. To identify clones with the cassette on the BAC, clones were plated in replica on agar plates selecting (1) for +3, (2) against −3, and (3) for +2 and against −3; Only clones surviving on plate (1) and (2) but not on (3) have the −31+3 cassette integrated on the BAC. The location of the cassette was verified by purifying the BAC using QlAprep Spin Miniprep Kit followed by genotyping. In a second step, the −31+3 cassette was replaced by providing a PCR-product of the desired sequence flanked by 50 bp-homology regions and integrated by lambda-red-mediated recombination followed by selection for +2 and against −3. The BAC was genotyped as above and sequence-verified by NGS.

[0355] Preparing a Non-Transferable F′ Plasmid and Conjugative Transfer of Episomes

[0356] We created the version of the F′ plasmid used for conjugation of genomic DNA, as well as transfer of BACs between strains, to enable transfer of sequences bearing oriT without transfer of the F′ plasmid itself (FIG. 22c). We achieved this by deleting the nick-site in the origin of transfer (oriT) within the F′ plasmid itself, a related approach was previously reported (Strand, T. A., et al., 2014. PLoS One 9, e90372). The F′ plasmid derivative, pRK24 (addgene #51950), was modified by integrating desired markers as PCR-products flanked by 50 bp-homology regions and integration was performed by lambda-red-mediated recombination using a variant of pKW20 carrying Kan^{R} instead of Tet^{R}. First, the β-lactamase gene, conferring ampicillin resistance in pRK24, was replaced with the artificial T5-luxABCDE operon (Bryksin, A. V. & Matsumura, I., 2010. PLoS One 5, e13244), which generates bioluminescence that allows visual identification of infected bacterial cells. Next, Tet^{R} was replaced with T3-aac3 that produces aminoglycoside 3-N-acetyltransferase IV for selection with 50 μg/mL apramycin. Finally, a 24 bp deletion of the nick-site in oriT was made by integrating EM7-bsd that expresses blasticidin-S deaminase, and can be selected for with 50 μg/mL blasticidin in low-salt TYE/LB. The resulting F′-plasmid called pJF146 (FIG. 22c), was extracted using QlAprep Spin Miniprep Kit (QlAgen) and transformed by electroporation into donor strains for subsequent conjugation.

[0357] Transfer of episomal DNA containing oriT was performed by conjugation (Isaacs, F. J. et al., 2011. Science 333, 348-353; and Ma, N. J., et al. 2014. Nat Protoc 9, 2285-2300). A donor strain was double transformed with pJF146 and an assembled BAC with oriT (see above). A recipient strain was transformed with pKW20. 5 ml of donor and recipient culture were grown to saturation overnight in selective LB media and subsequently washed 3 times with LB media without antibiotics. The resuspended donor and recipient strains were combined in a 4:1 ratio, spotted on TYE agar plates and incubated for 1h at 37° C. The cells were washed off the plate and spread in serial dilutions on LB agar plates with 2% glucose, 5 μg/ml tetracycline selecting for the recipient strain and antibiotic selecting for the BAC. Successful transfer of the BAC was confirmed by colony PCR of the BAC-vector insert junctions.

[0358] Assembling a Synthetic Genome from Recoded Sections

[0359] Transfer of genomic DNA was combined with subsequent recBCD-mediated recombination to assemble partially synthetic E. coli genomes into a synthetic genome. In preparation of the donor and recipient strains a rpsL-HygR-oriT or Gm^{R}-oriT cassette was supplied as PCR product and integrated into the donor strain genome via lambda-red-mediated recombination (FIG. 22a,b). Separately, a pheS*-Hyg^{R} cassette was integrated approximately 3 kb downstream of the synthetic DNA in the donor strains. This provided a template genomic DNA for PCR amplification of a 3 kb synthetic DNA segment with 3′ pheS*-Hyg^{R} selection cassette. This PCR product was provided to the recipient strains to replace the WT DNA in a lambda-red-mediated recombination. Thereby, the selection marker at the 3′ end of the synthetic segment was replaced and a 3 kb homology region to the donor synthetic DNA was generated. This strategy served to systematically generate recipient strains with 3 kb of homology with their respective donors, always with a pheS-Hyg^{R} at the 3′ end. Additionally, the donor strains were transformed with pJF146 and sensitivity to tetracycline was confirmed. In contrast, pKW20 was maintained in the donor strains to confer tetracycline resistance.

[0360] For conjugation, donor and recipient strain were grown to saturation overnight in LB medium with 2% glucose, 5 μg/ml tetracycline and 50 μg/ml kanamycin or 20 μg/ml chloramphenicol (donor) and 50 μg/ml apramycin and 200 μg/mL hygromycin B (recipient). The overnight cultures were diluted 1:10 in the same selective LB medium and grown to OD₆₀₀=0.5. 50 ml of both donor and recipient culture were washed 3 times with LB medium with 2% glucose and then each resuspended in 400 μl LB medium with 2% glucose. 320 μl of donor was mixed with 80 μl of recipient, spotted on TYE agar plates and incubated at 37° C. The incubation time depended on the length of transferred synthetic DNA and doubling time of the recipient strain and varied from 1h to 3h. Cells were washed off the plate and transferred into 100 ml LB medium with 2% glucose and 5 μg/ml tetracycline and incubated at 37° C. for 2h with shaking. Subsequently 50 μg/ml kanamycin or 20 μg/ml chloramphenicol (selecting for the transferred positive selection marker of the donor) was added, followed by another 2 h incubation at 37° C. The culture was spun down and resuspended in 4 ml Milli-Q filtered water and spread in serial dilutions on selection plates of LB agar with 2% glucose, 5 μg/ml tetracycline, 2.5 mM 4-chloro-phenylalanine and 50 μg/ml kanamycin or 20 μg/ml chloramphenicol. Successful DNA transfer and recombination was determined by colony PCR for the loss of the pheS*-Hyg^{R} cassette, integration of the donor's selection cassette and absence of the Gm-oriT cassette.

[0361] Preparation of Whole-Genome and BAC Libraries for Next-Generation Sequencing

[0362] E. coli genomic DNA was purified using the DNEasy Blood and Tissue Kit (QlAgen) as per manufacturer's instructions. BACs were extracted from cells with the QlAprep Spin Miniprep Kit (QlAgen) as per manufacturer's instructions. We found that this kit was suitable for purification of BACs in excess of 130 kb. We avoided vigorous shaking of the samples throughout purification so as to reduce DNA shearing.

[0363] Paired-end Illumina sequencing libraries were prepared using the Illumina Nextera XT Kit as per manufacturer's instructions. Sequencing data was obtained in the Illumina MiSeq, running 2×300 or 2×75 cycles with the MiSeq Reagent kit v3.

[0364] Sequencing Data Analysis

[0365] The standard workflow for sequence analysis in this work is compiled in the iSeq package. In short, sequencing reads were aligned to a reference recoded or wild-type genome using bowtie2 with soft-clipping activated (Langmead, B. & Salzberg, S. L., 2012. Nat Methods 9, 357-359). Aligned reads were sorted and indexed with samtools (Li, H. et al., 2009. Bioinformatics 25, 2078-2079). A customised Python script combines functionalities of samtools and igvtools to yield a variant calling summary. This script was used to assess mutations, indels and structural variations, in combination with visual analysis in the Integrative Genomics Viewer (Thorvaldsdottir, H., et al., 2013. Brief Bioinform 14, 178-192).

[0366] We produced a custom Python script to generate recoding landscapes across a target genomic region. Briefly, the script takes a BAM alignment file, a reference in fasta and a

[0367] GeneBank annotation file as inputs. It identifies the target codons for recoding, and compiles the reads that align to these target codons in the alignment file. It then outputs the frequency of recoding at each target codon, and plots these frequencies across the length of the genomic region of interest.

[0368] Growth Rate Measurement and Analysis

[0369] Bacterial clones were grown overnight at 37° C. in LB with 2% glucose and 100 μg/mL streptomycin. Overnight cultures were diluted 1:50 and monitored for growth while varying temperature (25° C., 37° C., or 42° C.) and media conditions (LB, LB with 2% glucose, M9 minimal media, 2XTY). Measurements of OD₆₀₀ were taken every 5 min for 18 h on a Biomek automated workstation platform with high speed linear shaking.

[0370] To determine doubling times, the growth curves were log2-transformed. At a linear phase of the curve during exponential growth, the first derivative was determined (d(log2(x))/dt) and ten consecutive time-points with the maximal log2-derivatives were used to calculate the doubling time for each replicate. A total of 10 independently grown biological replicates were measured for the recoded Syn61 strain and wt MDS42^{rpsLK43R}. The mean doubling time and standard deviation from the mean were calculated for all n=10 replicates.

[0371] Microscopy and Cell Size Measurement

[0372] Cells were grown with shaking in LB supplemented with 100 μg/mL streptomycin to approximately OD₆₀₀=0.2. A thin layer of bacteria was sandwiched between an agarose pad and a coverslip. A standard microscope slide was prepared with a 1% agarose pad (Sigma-Aldrich A4018-5G). A sample of 2 μl to 4 μl of bacterial culture was dropped onto the top of the pad. This was covered by a #1 coverslip supported on either side by a glass spacer matched to the ˜1 mm height of the pad. Samples were imaged on an upright Zeiss

[0373] Axiophot phase contrast microscope using a 63× 1.25NA Plan Neofluar phase objective (Zeiss UK, Cambridge, UK). Images were taken using an IDS ueye monochrome camera under control of ueye cockpit software (IDS Imaging Development Systems GmbH, Obersulm, Germany). 10 fields were taken of each sample. Images were loaded in to Nikon NIS Elements software for further quantitation (Nikon Instruments Surrey UK). The General analysis tool was used to apply an intensity threshold to segment the bacteria. A one micron lower size limit was imposed to remove background particulates and dust. Length measurements were subsequently made on the segmented bacteria using the General Analysis quantification tools.

[0374] Mass Spectrometry

[0375] Three biological replicates were performed for each strain. Proteins from each Escherichia coli lysates were solubilized in a buffer containing 6 M urea in 50 mM ammonium bicarbonate, reduced with 10 mM DTT, and alkylated with 55 mM iodoacetamide. After alkylation, proteins were diluted to 1 M urea with 50 mM ammonium bicarbonate, digested with Lys-C (Promega, UK) ata protein to enzyme ratio of 1:50 for 2 hours at 37° C., followed by digestion with Trypsin (Promega, UK) at a protein to enzyme ratio of 1:100 for 12 hours 37° C. The resulting peptide mixtures were acidified by the addition formic acid to a final concentration of 2% v/v. The digests were analysed in duplicate (1 ug initial protein/injection) by nano-scale capillary LC-MS/MS using a Ultimate U3000 HPLC (ThermoScientific Dionex, San Jose, USA) to deliver a flow of approximately 300 nL/min. A C18 Acclaim PepMap100 5 μm, 100 μm×20 mm nanoViper (ThermoScientific Dionex, San Jose, USA), trapped the peptides prior to separation on a C18 Acclaim PepMap100 3 μm, 75 μm×250 mm nanoViper (ThermoScientific Dionex, San Jose, USA). Peptides were eluted with a 100 minute gradient of acetonitrile (2% to 60%). The analytical column outlet was directly interfaced via a nano-flow electrospray ionisation source, with a hybrid dual pressure linear ion trap mass spectrometer (Orbitrap Velos, ThermoScientific, San Jose, USA). Data dependent analysis was carried out, using a resolution of 30,000 for the full MS spectrum, followed by ten MS/MS spectra in the linear ion trap. MS spectra were collected over a m/z range of 300-2000. MS/MS scans were collected using a threshold energy of 35 for collision induced dissociation. All raw files were processed with MaxQuant 1.5.5.1 using standard settings and searched against an Escherichia coli strain K-12 with the Andromeda search engine integrated into the MaxQuant software suite. Enzyme search specificity was Trypsin/P for both endoproteinases. Up to two missed cleavages for each peptide were allowed. Carbamidomethylation of cysteines was set as fixed modification with oxidized methionine and protein N-acetylation considered as variable modifications. The search was performed with an initial mass tolerance of 6 ppm for the precursor ion and 0.5 Da for CID MS/MS spectra. The false discovery rate was fixed at 1% at the peptide and protein level. Statistical analysis was carried out using the Perseus (1.5.5.3) module of MaxQuant. Prior to statistical analysis, peptides mapped to known contaminants, reverse hits and protein groups only identified by site were removed. Only protein groups identified with at least two peptides, one of which was unique and two quantitation events were considered for data analysis. For proteins quantified at least once in each strain, the average abundance of each protein across replicates of Syn61 was divided by the abundance in MDS42 replicates, and then log2-transformed. A P-value for the difference in abundance between strains was calculated by two-sample T-test (Perseus).

[0376] Toxicity of CYPK Incorporation using Orthogonal Aminoacyl-tRNA Synthetases tRNAxxxs (Elliott, T. S. et al., 2014. Nat Biotechnol 32, 465-472; Elliott, T. S., et al., 2016. Cell Chem Biol 23, 805-815; and Krogager, T. P. et al., 2018. Nat Biotechnol 36, 156-159)

[0377] Electrocompetent MDS42 and Syn61 cells were transformed with plasmid pKW1_MmPylS__PylTₓₓₓ for expression of PyIRS and tRNA^{Pyl}ₓₓₓ, where XXX is the indicated anticodon. Three variants of this plasmid were used, with the anticodon of tRNA^{Pyl} mutated to CGA (pKW1_MmPylS_PylT_{CGA}), UGA (pKW1_MmPylS_PylT_{UGA}) or GCU (pKW1_MmPylS_PylT_{GCU}). Cells were grown over night in LB medium with 75 μg/ml spectinomycin. Overnight cultures were diluted 1:100 into LB supplemented with Nε-(((2-methylcycloprop-2-en-1-yl) methoxy) carbonyl)-L-lysine (CYPK) at 0 mM, 0.5 mM, 1 mM, 2.5 mM and 5 mM and growth was measured as described above. “% Max Growth” was determined as the final OD₆₀₀ in the presence of the indicated concentration of CYPK divided by the final OD₆₀₀ in the absence of CYPK. Final OD₆₀₀s were determined after 600 min.

[0378] Deletion of prfA, serU and serT by Homologous Recombination

[0379] Recoded versions of the pheS*-Hyg^{R} and rpsL-Kan^{R} cassettes, according to the recoding scheme described in FIG. 1a, were synthesised de novo, so that expression of the selection proteins would not rely on decoding by serU or serT. For deleting prfA, the recoded rpsL-Kan^{R} was amplified with oligos containing ˜50 bp homology to the prfA flanking genomic sequences. The same was done for serU and serT with recoded selection cassette pheS*-Hyg^{R}. Oligonucleotide sequences are provided in FIG. 23. Syn61 cells harbouring the plasmid pKW20_CDFtet_pAraRedCas9_tracrRNA were made competent as described above, using 2×TY instead of LB. Cells were electroporated with ˜8 μg of PCR product, and recovered for 1 hour in 4 mL SOB, then transferred to 100 mL 2×TY supplemented with 5 pg/ml tetracycline. After 4 hours cells were spun down, resuspended in 500 μL H₂O and plated in serial dilutions in 2×TY agar plates supplemented with 5 μg/ml tetracycline and 200 μg/ml hygromycin B (for pheS*-Hyg^{R}) or 50 μg/ml kanamycin (for rpsL-Kan^{R}). Deletions were verified in each case by colony PCR with primers flanking the locus of interest.

[0380] All publications mentioned in the above specification are herein incorporated by reference. Various modifications and variations of the disclosed methods, cells, compositions and uses of the invention will be apparent to the skilled person without departing from the scope and spirit of the invention. Although the invention has been disclosed in connection with specific preferred embodiments, it should be understood that the invention as claimed should not be unduly limited to such specific embodiments. Indeed, various modifications of the disclosed modes for carrying out the invention, which are obvious to the skilled person are intended to be within the scope of the following claims.

1. A synthetic prokaryotic genome comprising 5 or fewer occurrences of one or more sense codons.

2. A synthetic prokaryotic genome according to claim 1, wherein the synthetic prokaryotic genome comprises 4 or fewer, 3 or fewer, 2 or fewer, 1 or fewer, or no occurrences of one or more sense codons.

3. A synthetic prokaryotic genome comprising 100 or more, 200 or more, or 300 or more genes, wherein the genes collectively comprise 5 or fewer occurrences of one or more sense codons, preferably wherein the genes are essential genes.

4. A synthetic prokaryotic genome according to claim 3, wherein the genes collectively comprise 4 or fewer, 3 or fewer, 2 or fewer, 1 or fewer, or no occurrences of one or more sense codons.

5. A synthetic prokaryotic genome according to any one of claims 1-4, wherein the synthetic prokaryotic genome is a synthetic bacterial genome, preferably a synthetic Escherichia coli, Salmonella enterica, or Shigella dysenteriae genome.

6. A synthetic prokaryotic genome according to any one of claims 1-5, wherein the one or more sense codons consist of one sense codon or two sense codons, preferably two sense codons.

7. A synthetic prokaryotic genome according to any one of claims 1-6, wherein the synthetic prokaryotic genome comprises no occurrences of two or more sense codons, preferably two sense codons, and no occurrences of one stop codon, preferably the amber stop codon (TAG).

8. A synthetic prokaryotic genome according to any one of claims 1-7, wherein the one or more sense codons are selected from TCG, TCA, TCT, TCC, AGT, AGC, GCG, GCA, GCT, GCC, CTG, CTA, CTT, CTC, TTG, and TTA, preferably the one or more sense codons are selected from TCG, TCA, AGT, AGC, GCG, GCA, CTG, CTA, TTG, and TTA, more preferably the one or more sense codons are selected from TCG, TCA, AGT, AGC, TTG, TTA, GCG and GCA, most preferably the one or more sense codons are TCG and/or TCA.

9. A synthetic prokaryotic genome according to any one of claims 1-8, wherein the synthetic prokaryotic genome comprises 10 or fewer, 5 or fewer, or no occurrences of the amber stop codon (TAG).

10. A synthetic prokaryotic genome derived from a parent prokaryotic genome, wherein the synthetic prokaryotic genome comprises less than 10%, 5%, 2%, 1%, 0.5%, 0.1% of the occurrences of one or more sense codons, relative to the parent prokaryotic genome, or wherein the synthetic prokaryotic genome comprises no occurrences of one or more sense codons.

11. A synthetic prokaryotic genome according to claim 10, wherein the synthetic prokaryotic genome is a bacterial genome, preferably an Escherichia coli, Salmonella enterica, or Shigella dysenteriae genome.

12. A synthetic prokaryotic genome according to claim 10 or claim 11, wherein the one or more sense codons consist of one sense codon or two sense codons, preferably two sense codons.

13. A synthetic prokaryotic genome according to any one of claim 10-12, wherein the one or more sense codons are selected from TCG, TCA, TCT, TCC, AGT, AGC, GCG, GCA, GCT, GCC, CTG, CTA, CTT, CTC, TTG, and TTA, preferably the one or more sense codons are selected from TCG, TCA, AGT, AGC, GCG, GCA, CTG, CTA, TTG, and TTA, more preferably the one or more sense codons are selected from TCG, TCA, AGT, AGC, TTG, TTA, GCG and GCA, most preferably the one or more sense codons are TCG and/or TCA, optionally wherein TCG and/or TCA are replaced with synonymous sense codons.

14. A synthetic prokaryotic genome according to any one of claims 10-13, wherein 90% or more, 95% or more, 98% or more, 99% or more, 99.5% or more, 99.6% or more, 99.7% or more, 99.8% or more, 99.9% or more, or 100% of the occurrences of the one or more sense codons in the parent prokaryotic genome are replaced with synonymous sense codons, preferably 90% or more, 95% or more, 98% or more, 99% or more, 99.5% or more, 99.6% or more, 99.7% or more, 99.8% or more, 99.9% or more, or 100% of the occurrences of TCG and/or TCA in the parent prokaryotic genome are replaced with AGC and/or AGT, most preferably 90% or more, 95% or more, 98% or more, 99% or more, 99.5% or more, 99.6% or more, 99.7% or more, 99.8% or more, 99.9% or more, or 100% of the occurrences of TCG in the parent prokaryotic genome are replaced with AGC and/or 90%, 95%, 90% or more, 95% or more, 98% or more, 99% or more, 99.5% or more, 99.6% or more, 99.7% or more, 99.8% or more, 99.9% or more, or 100% of the occurrences of TCA in the parent prokaryotic genome are replaced with AGT.

15. A synthetic prokaryotic genome according to any one of claims 10-14, wherein the synthetic prokaryotic genome comprises 10 or fewer, 5 or fewer, or no occurrences of the amber stop codon (TAG), preferably wherein 90% or more, 95% or more, 98% or more, 99% or more, or all of the occurrences of TAG in the parent prokaryotic genome are replaced with TAA.

16. A synthetic prokaryotic genome according to any one of claims 10-15, wherein 99.9% or more, or 100% of the occurrences of two or more sense codons, preferably two sense codons, in the parent prokaryotic genome are replaced with synonymous sense codons, and wherein all of the occurrences of TAG in the parent prokaryotic genome are replaced with TAA.

17. A synthetic prokaryotic genome according to any one of claims 10-16, wherein one or more pairs of genes which share an overlapping region comprising the one or more sense codons in the parent prokaryotic genome are refactored, preferably wherein the one or more pairs of genes are those in which replacement of one or more of the sense codons with synonymous sense codons would change the encoded protein sequence of both or either of the pair of genes.

18. A synthetic prokaryotic genome according to claim 17, wherein for pairs of genes in opposite orientations, a synthetic insert is inserted between the genes, wherein the synthetic insert comprises the overlapping region; and/or wherein for pairs of genes in the same orientation, a synthetic insert is inserted between the genes, wherein the synthetic insert comprises: (i) a stop codon; (ii) about 20-200 bp from upstream of the overlapping region; and (iii) the overlapping region.

19. A synthetic prokaryotic genome according to any one of claims 1-18, wherein the synthetic prokaryotic genome is viable.

20. A synthetic prokaryotic genome according to any one of claims 1-19, wherein the synthetic prokaryotic genome is 100 kb to 10 Mb, or 1 Mb to 10 Mb, or 2 Mb to 6 Mb in size.

21. A polynucleotide comprising twenty or more, thirty or more, forty or more, fifty or more, 100 or more essential genes with no occurrences of one or more sense codons.

22. A polynucleotide according to claim 21, wherein the one or more sense codons consist of one sense codon or two sense codons, preferably two sense codons.

23. A polynucleotide according to claim 21 or 22, wherein the one or more sense codons are selected from TCG, TCA, TCT, TCC, AGT, AGC, GCG, GCA, GCT, GCC, CTG, CTA, CTT, CTC, TTG, and TTA, preferably the one or more sense codons are selected from TCG, TCA, AGT, AGC, GCG, GCA, CTG, CTA, TTG, and TTA, more preferably the one or more sense codons are selected from TCG, TCA, AGT, AGC, TTG, TTA, GCG and GCA, most preferably the one or more sense codons are TCG and/or TCA.

24. A polynucleotide according to any one of claims 21-23, wherein the occurrences of the one or more sense codons in the genes are replaced with synonymous sense codons, preferably TCG codons are replaced with AGC and/or TCA codons are replaced with AGT.

25. A polynucleotide according to any one of claims 21-24, wherein the essential genes comprise essential genes selected from one or more of the list consisting of: ribF, IspA, ispH, dapB, folA, imp, yabQ, ftsL, ftsl, murE, murF, mraY, murD, ftsW, murG, murC, ftsQ, ftsA, ftsZ, IpxC, secM, secA, can, folk, hemL, yadR, dapD, map, rpsB, tsf, pyrH, frr, dxr, ispU, cdsA, yaeL, yaeT, IpxD, fabZ, IpxA, IpxB, dnaE, accA, tilS, proS, yafF, hemB, secD, secF, ribD, ribE, thiL, dxs, ispA, dnaX, adk, hemH, IpxH, cysS, folD, entD, mrdB, mrdA, nadD, holA, rIpB, leuS, Int, gInS, fldA, cydA, infA, cydC, ftsK, lolA, serS, rpsA, msbA, IpxK, kdsB, mukF, mukE, mukB, asnS, fabA, mviN, me, fabD, fabG, acpP, tmk, holB, loIC, loID, LolE, purB, minE, minD, pth, prsA, ispE, loIB, hemA, prfA, prmC, kdsA, topA, ribA, fabl, tyrS, ribC, ydiL, pheT, pheS, rplT, infC, thrS, nadE, gapA, yeaZ, aspS, argS, pgsA, yefM, metG, folE, yejM, gyrA, nrdA, nrdB, folC, accD, fabB, gltX, ligA, zipA, dapE, dapA, der, hisS, ispG, suhB, tadA, acpS, era, mc, lepB, rpoE, pssA, yfiO, rpIS, trmD, rpsP, ffh, grpE, csrA, ispF, ispD, ftsB, eno, pyrG, chpR, lgt, fbaA, pgk, yqgD, metK, yqgF, plsC, ygiT, parE, ribB, cca, ygjD, tdcF, yraL, yhbV, infB, nusA, ftsH, obgE, rpmA, rplU, ispB, murA, yrbB, yrbK, yhbN, rpsl, rpIM, degS, mreD, mreC, mreB, accB, accC, yrdC, def, fmt, rpIQ, rpoA, rpsD, rpsK, rpsM, secY, rpIO, rpmD, rpsE, rpIR, rpIF, rpsH, rpsN, rplE, rpIX, rpIN, rpsQ, rpmC, rpIP, rpsC, rpIV, rpsS, rpIB, rpIW, rpID, rpIC, rpsJ, fusA, rpsG, rpsL, trpS, yrfF, asd, rpoH, ftsX, ftsE, ftsY, yhhQ, bcsB, glyQ, gpsA, rfaK, kdtA, coaD, rpmB, dfp, dut, gmk, spoT, gyrB, dnaN, dnaA, rpmH, rnpA, yidC, tnaB, glmS, glmU, wzyE, hemD, hemC, yigP, ubiB, ubiD, hemG, yihA, ftsN, murl, murB, birA, secE, nusG, rpIJ, rpIL, rpoB, rpoC, ubiA, plsB, lexA, dnaB, ssb, alsK, groS, psd, orn, yjeE, rpsR, chpS, ppa, valS, yjgP, yjgQ, and dnaC.

26. A prokaryotic host cell comprising the synthetic prokaryotic genome according to any one of claims 1-20 or the polynucleotide according to any one of claims 21-25.

27. A prokaryotic host cell according to claim 26, wherein the prokaryotic host cell is viable.

28. A prokaryotic host cell according to claim 26 or claim 27, wherein the prokaryotic host cell is a bacterial cell, preferably an Escherichia coli, Salmonella enterica, or Shigella dysenteriae cell.

29. A prokaryotic host cell according to any one of claims 26-28, for use in production of polypeptides comprising one or more non-proteinogenic amino acids, preferably two or more non-proteinogenic amino acids, most preferably three or more non-proteinogenic amino acids.

30. Use of a prokaryotic host cell according to any one of claims 26-29 for producing polypeptides comprising one or more non-proteinogenic amino acids, preferably two or more non-proteinogenic amino acids, most preferably three or more non-proteinogenic amino acids.

31. A method for producing a synthetic genome comprising:
(a) providing a parent genome;
(b) carrying out one or more rounds of recombination-mediated genetic engineering on the parent genome, to produce two or more different partially synthetic genomes; and
(c) carrying out one or more rounds of directed conjugation with the two or more different partially synthetic genomes to produce a synthetic genome;
wherein the partially synthetic genomes each comprise a synthetic region that has 50 or fewer, 20 or fewer, 10 or fewer, 5 or fewer, or 0 occurrences of each of one or more sense codons; or wherein the partially synthetic genomes each comprise a synthetic region that has less than 10%, 5%, 2%, 1%, 0.5%, 0.1% of the occurrences of each of one or more sense codons, relative to the corresponding region in the parent genome.

32. A method for producing a synthetic genome according to claim 31, wherein the synthetic regions collectively cover 90% or greater, 95% or greater, 99% or greater or 100% of the parent genome.

33. A method for producing a synthetic genome according to claim 31 or claim 32, wherein the synthetic regions are 10-1000 kb, 50-1000 kb, 100-1000 kb, or 100-500 kb in size.

34. A method for producing a synthetic genome according to any one of claims 31-33, wherein the viability of the partially synthetic genomes is tested after each round of recombination-mediated genetic engineering and/or after each round of directed conjugation.

35. A method for producing a synthetic genome according to any one of claims 31-34, wherein the two or more different partially synthetic genomes comprise at least one partially synthetic donor genome and at least one partially synthetic recipient genome.

36. A method for producing a synthetic genome according to claim 35, wherein the at least one partially synthetic donor genome comprises a synthetic region and a first selectable marker flanked by two homology regions immediately downstream of an origin of transfer; and wherein the at least one partially synthetic recipient genomes comprise a second selectable marker flanked by two corresponding homology regions, optionally wherein the first selectable marker comprises a positive selectable marker, and/or the second selectable marker comprises a negative selectable marker.

37. A method for producing a synthetic genome according to claim 36, wherein the synthetic region present in the at least one partially synthetic recipient genomes is outside the region flanked by the homology regions.

38. A method for producing a synthetic genome according to claim 36 or claim 37, wherein the method further comprises one or more rounds of selection for the selectable markers.

39. A method for producing a synthetic genome according to any one of claims 31-38, wherein the one or more rounds of recombination-mediated genetic engineering comprise one or more rounds of replicon excision for enhanced genome engineering through programmed recombination (REXER).

40. A method for producing a synthetic genome according to any one of claims 31-39, wherein the synthetic genome is a synthetic prokaryotic genome according to any one of claims 1-20.

41. A synthetic prokaryotic genome produced by the method according to any one of claims 31-40.

The application's sequence listing, which the Patent Office published only in electronic form, follows.

SEQUENCE LISTING (360 sequences)

SEQ ID NO: 1 - DNA, 3978937 bp, Artificial Sequence (residues 1-1,989,469 of 3,978,937)
  Synthetic E. coli genome
agcttttcattctgactgcaacgggcaatatgtctctgtgtggattaaaaaaagagtgtctgatagcagcttctgaactggttacctgccgtgagtaaattaaaattttattgacttaggtcactaaatactttaaccaatataggcatagcgcacagacagataaaaattacagagtacacaacatccatgaaacgcattagcaccaccattaccaccaccatcaccattaccacaggtaacggtgcgggctgacgcgtacaggaaacacagaaaaaagcccgcacctgacagtgcgggctttttttttcgaccaaaggtaacgaggtaacaaccatgcgagtgttgaagttcggcggtacaagtgtggcaaatgcagaacgttttctgcgtgttgccgatattctggaaagcaatgccaggcaggggcaggtggccaccgtcctctctgcccccgccaaaatcaccaaccacctggtggcgatgattgaaaaaaccattagcggccaggatgctttacccaatatcagcgatgccgaacgtatttttgccgaacttttgacgggactcgccgccgcccagccggggttcccgctggcgcaattgaaaactttcgtcgatcaggaatttgcccaaataaaacatgtcctgcatggcattagtttgttggggcagtgcccggatagcatcaacgctgcgctgatttgccgtggcgagaaaatgagcatcgccattatggccggcgtattagaagcgcgcggtcacaacgttactgttatcgatccggtcgaaaaactgctggcagtggggcattacctcgaatctaccgtcgatattgctgagtccacccgccgtattgcggcaagccgcattccggctgatcacatggtgctgatggcaggtttcaccgccggtaatgaaaaaggcgaactggtggtgcttggacgcaacggttccgactactctgctgcggtgctggctgcctgtttacgcgccgattgttgcgagatttggacggacgttgacggggtctatacctgcgacccgcgtcaggtgcccgatgcgaggttgttgaagagcatgtcctaccaggaagcgatggagctttcctacttcggcgctaaagttcttcacccccgcaccattacccccatcgcccagttccagatcccttgcctgattaaaaataccggaaatcctcaagcaccaggtacgctcattggtgccagccgtgatgaagacgaattaccggtcaagggcatttccaatctgaataacatggcaatgttcagcgtttctggtccggggatgaaagggatggtcggcatggcggcgcgcgtctttgcagcgatgagtcgcgcccgtatttccgtggtgctgattacgcaaagttcttccgaatacagcatcagtttctgcgttccacaaagcgactgtgtgcgagctgaacgggcaatgcaggaagagttctacctggaactgaaagaaggcttactggagccgctggcagtgacggaacggctggccattatcagcgtggtaggtgatggtatgcgcaccttgcgtgggatcagcgcgaaattctttgccgcactggcccgcgccaatatcaacattgtcgccattgctcagggatcttctgaacgcagtatctctgtcgtggtaaataacgatgatgcgaccactggcgtgcgcgttactcatcagatgctgttcaataccgatcaggttatcgaagtgtttgtgattggcgtcggtggcgttggcggtgcgctgctggagcaactgaagcgtcagcaaagctggctgaagaataaacatatcgacttacgtgtctgcggtgttgccaacagcaaggctctgctcaccaatgtacatggccttaatctggaaaactggcaggaagaactggcgcaagccaaagagccgtttaatctcgggcgcttaattcgcctcgtgaaagaatatcatctgctgaacccggtcattgttgactgcacttccagccaggcagtggcggatcaatatgccgacttcctgcgcgaaggtttccacgttgtcacgccgaacaaaaaggccaacaccagcagcatggattactaccatcagttgcgttatgcggcggaaaaaagccggcgtaaattcctctatgacaccaacgttggggctggattaccggttattgagaacctgcaaaatctgctcaatgcaggtgatgaattgatgaagttctccggcattctttctggtagcctttcttatatcttcggcaagttagacgaaggcatgagtttctccgaggcgaccacgctggcgcgggaaatgggttataccgaaccggacccgcgagatgatctttctggtatggatgtggcgcgtaaactattgattctcgctcgtgaaacgggacgtgaactggagctggcggatattgaaattgaacctgtgctgcccgcagagtttaacgccgagggtgatgttgccgcttttatggcgaatctgagtcaactcgacgatctctttgccgcgcgcgtggcgaaggcccgtgatgaaggaaaagttttgcgctatgttggcaatattgatgaagatggcgtctgccgcgtgaagattgccgaagtggatggtaatgatccgctgttcaaagtgaaaaatggcgaaaacgccctggccttctatagccactattatcagccgctgccgttggtactgcgcggatatggtgcgggcaatgacgttacagctgccggtgtctttgctgatctgctacgtaccctcagttggaagttaggagtctgacatggttaaagtttatgccccggcttccagtgccaatatgagcgtcgggtttgatgtgctcggggcggcggtgacacctgttgatggtgcattgctcggagatgtagtcacggttgaggcggcagagacattcagtctcaacaacctcggacgctttgccgataagctgccgagtgaaccacgggaaaatatcgtttatcagtgctgggagcgtttttgccaggaactgggtaagcaaattccagtggcgatgaccctggaaaagaatatgccgatcggtagcggcttaggctccagtgcctgtagcgtggtcgcggcgctgatggcgatgaatgaacactgcggcaagccgcttaatgacactcgtttgctggctttgatgggcgagctggaaggccgtatctccggcagcattcattacgacaacgtggcaccgtgttttctcggtggtatgcagttgatgatcgaagaaaacgacatcatcagccagcaagtgccagggtttgatgagtggctgtgggtgctggcgtatccggggattaaagtcagcacggcagaagccagggctattttaccggcgcagtatcgccgccaggattgcattgcgcacgggcgacatctggcaggcttcattcacgcctgctattcccgtcagcctgagcttgccgcgaagctgatgaaagatgttatcgctgaaccctaccgtgaacggttactgccaggcttccggcaggcgcggcaggcggtcgcggaaatcggcgcggtagcgagcggtatctccggctccggcccgaccttgttcgctctgtgtgacaagccggaaaccgcccagcgcgttgccgactggttgggtaagaactacctgcaaaatcaggaaggttttgttcatatttgccggctggatacggcgggcgcacgagtactggaaaactaaatgaaactctacaatctgaaagatcacaacgagcaggtcagctttgcgcaagccgtaacccaggggttgggcaaaaatcaggggctgttttttccgcacgacctgccggaattcagcctgactgaaattgatgagatgctgaagctggattttgtcacccgcagtgcgaagatcctcagcgcgtttattggtgatgaaatcccacaggaaatcctggaagagcgcgtgcgcgcggcgtttgccttcccggctccggtcgccaatgttgaaagcgatgtcggttgtctggaattgttccacgggccaacgctggcatttaaagatttcggcggtcgctttatggcacaaatgctgacccatattgcgggtgataagccagtgaccattctgaccgcgacctccggtgataccggagcggcagtggctcatgctttctacggtttaccgaatgtgaaagtggttatcctctatccacgaggcaaaatcagtccactgcaagaaaaactgttctgtacattgggcggcaatatcgaaactgttgccatcgacggcgatttcgatgcctgtcaggcgctggtgaagcaggcgtttgatgatgaagaactgaaagtggcgctagggttaaacagcgctaacagcattaacatcagccgtttgctggcgcagatttgctactactttgaagctgttgcgcagctgccgcaggagacgcgcaaccagctggttgtcagcgtgccaagcggaaacttcggcgatttgacggcgggtctgctggcgaagagtctcggtctgccggtgaaacgttttattgctgcgaccaacgtgaacgataccgtgccacgtttcctgcacgacggtcagtggagtcccaaagcgactcaggcgacgttatccaacgcgatggacgtgagtcagccgaacaactggccgcgtgtggaagagttgttccgccgcaaaatctggcaactgaaagagctgggttatgcagccgtggatgatgaaaccacgcaacagacaatgcgtgagttaaaagaactgggctacactagcgagccgcacgctgccgtagcttatcgtgcgctgcgtgatcagttgaatccaggcgaatatggcttgttcctcggcaccgcgcatccggcgaaatttaaagagagcgtggaagcgattctcggtgaaacgttggatctgccaaaagagctggcagaacgtgctgatttacccttgcttagtcataatctgcccgccgattttgctgcgttgcgtaaattgatgatgaatcatcagtaaaatctattcattatctcaatcaggccgggtttgcttttatgcagcccggcttttttatgaagaaattatggagaaaaatgacagggaaaaaggagaaattctcaataaatgcggtaacttagagattaggattgcggagaataacaaccgccgttctcatcgagtaatctccggatatcgacccataacgggcaatgataaaaggagtaacctgtgaaaaagatgcaatctatcgtactcgcactttccctggttctggtcgctcccatggcagcacaggctgcggaaattacgttagtcccgagtgtaaaattacagataggcgatcgtgataatcgtggctattactgggatggaggtcactggcgcgaccacggctggtggaaacaacattatgaatggcgaggcaatcgctggcacctacacggaccgccgccaccgccgcgccaccataagaaagctcctcatgatcatcacggcggtcatggtccaggcaaacatcaccgctaaatgacaaatgccgggtaacaatccggcattcagcgcctgatgcgacgctggcgcgtcttatcaggcctacgttaattctgcaatatattgaatctgcatgcttttgtaggcaggataaggcgttcacgccgcatccggcattgactgcaaacttaacgctgctcgtagcgtttaaacaccagttcgccattgctggaggaatcttcatcaaagaagtaaccttcgctattaaaaccagtcagttgctctggtttggtcagccgattttcaataatgaaacgactcatcagaccgcgtgctttcttagcgtagaagctgatgatcttaaatttgccgttcttctcatcgaggaacaccggcttgataatctcggcattcaatttcttcggcttcacgcttttaaaatactcatcactcgccagattaatcaccacattatcgccttgtgctgcgagcgcctcgttcagcttgttggtgatgatatctccccagaattgatacagatctttccctcgggcattctcaagacggatccccatttccagacgataaggctgcattaaatcgagcgggcggagtacgccatacaagccggaaagcattcgcaaatgctgttgggcaaaatcgaaatcgtcttcgctgaaggtttcggcctgcaagccggtgtagacatcacctttaaacgccagaatcgcctggcgggcattcgccggcgtgaaatctggctgccagtcatgaaagcgagcggcgttgatacccgccagtttgtcgctgatgcgcatcagcgtgctaatctgcggaggcgtcagtttccgcgcctcatggatcaactgctgggaattgtctaacagctccggcagcgtatagcgcgtggtggtcaacgggctttggtaatcaagcgttttcgcaggactaataagaatcagcatatccagtccttgcaggaaatttatgccgactttagcaaaaaatgagaatgagttgatcgatagttgtgattactcctggctaacatcatcccacgcgtccggagaaagctggcgaccgatatccggataacgcaatggatcaaacaccgggcgcacgccgagtttacgctggcgtagataatcactggcaatggtatgaaccacagggctgagcagtaaaatggcggtcaaattggtaatagccatgcaggccattatgatatctgccagttgccacatcagcggaaggcttagcaaggtgccgccgatgaccgttgcgaaggtgcagatccgcaaacaccagatcgctttagggttgttcaggcgtaaaaagaagagattgttttcggcataaatgtagttggcaacgatggagctgaaggcaaacagaataaccacaagggtaacaaactcagcaccccaggaacccattagcacccgcatcgccttctggataagctgaataccttccagcggcatgtaggttgtgccgttacccgccagtaatatcagcatggcgcttgccgtacagatgaccagggtgtcgataaaaatgccaatcatctggacaatcccttgcgctgccggatgcggaggccaggacgccgctgccgctgccgcgtttggcgtgctacccattcccgcctcattggaaaacatactgcgctgaaaaccgttagtaatcgcctggcttaaggtatatcccgccgcgccgcctgccgcttcctgccagccaaaagcactctcaaaaatagaccaaatgacgtggggaagttgcccgatattcattacgcaaattaccaggctggtcagtacccagattatcgccatcaacgggacaaagccctgcatgagccgggcgacgccatgaagaccgcgagtgattgccagcagagtaaagacagcgagaataatgcctgtcaccagcgggggaaaatcaaaagaaaaactcagggcgcgggcaacggcgttcgcttgaactccgctgaaaattatgccataggcgatgagcaaaaagacggcgaacagaacgcccatccagcgcatccccagcccgcgcgccatataccatgccggtccgccacgaaactgcccattgacgtcacgttctttataaagttgtgccagagaacattcggcaaagctggtcgccatgccgataaacgcggcaacccacatccaaaagacggctccaggtccaccggcggtaatagccagcgcaacgccggccaggttgccgctacccacgcgcgccgcaagactggtacacaaactctgaaaactggttaaaccgcctggctgtggatgaatgctatttttaagacttttgccaaactggcggatgtagcgaaactgcacaaatccggtgcgaaaagtgaaccaacaacctgcgccgaagagcaggtaaatcattacgcttccccaaaggacgctgttaatgaaggagaaaaaatctggcatgcatatccctcttattgccggtcgcgatgactttcctgtgtaaacgttaccaattgtttaagaagtatatacgctacgaggtacttgataacttctgcgtagcatacatgaggttttgtataaaaatggcgggcgatatcaacgcagtgtcagaaatccgaaacagtctcgcctggcgataaccgtcttgtcggcggttgcgctgacgttgcgtcgtgatatcatcagggcagaccggttacatccccctaacaagctgtttaaagagaaatactatcatgacggacaaattgacctcccttcgtcagtacaccaccgtagtggccgacactggggacatcgcggcaatgaagctgtatcaaccgcaggatgccacaaccaacccttctctcattcttaacgcagcgcagattccggaataccgtaagttgattgatgatgctgtcgcctgggcgaaacagcagagcaacgatcgcgcgcagcagatcgtggacgcgaccgacaaactggcagtaaatattggtctggaaatcctgaaactggttccgggccgtatcagtactgaagttgatgcgcgtctttcctatgacaccgaagcgagtattgcgaaagcaaaacgcctgatcaaactctacaacgatgctggtattagcaacgatcgtattctgatcaaactggcttctacctggcagggtatccgtgctgcagaacagctggaaaaagaaggcatcaactgtaacctgaccctgctgttctccttcgctcaggctcgtgcttgtgcggaagcgggcgtgttcctgatcagcccgtttgttggccgtattcttgactggtacaaagcgaataccgataagaaagagtacgctccggcagaagatccgggcgtggtttctgtatctgaaatctaccagtactacaaagagcacggttatgaaaccgtggttatgggcgcaagcttccgtaacatcggcgaaattctggaactggcaggctgcgaccgtctgaccatcgcaccggcactgctgaaagagctggcggagagcgaaggggctatcgaacgtaaactgtcttacaccggcgaagtgaaagcgcgtccggcgcgtatcactgagtccgagttcctgtggcagcacaaccaggatccaatggcagtagataaactggcggaaggtatccgtaagtttgctattgaccaggaaaaactggaaaaaatgatcggcgatctgctgtaatcattcttagcgtgaccgggaagtcggtcacgctacctcttctgaagcctgtctgtcactcccttcgcagtgtatcattctgtttaacgagactgtttaaacggaaaaatcttgatgaatactttacgtattggcttagtttccatctctgatcgcgcatccagcggcgtttatcaggataaaggcatccctgcgctggaagaatggctgacaagcgcgctaaccacgccgtttgaactggaaacccgcttaatccccgatgagcaggcgatcatcgagcaaacgttgtgtgagctggtggatgaaatgagttgccatctggtgctcaccacgggcggaactggcccggcgcgtcgtgacgtaacgcccgatgcgacgctggcagtagcggaccgcgagatgcctggctttggtgaacagatgcgccagatcagcctgcattttgtaccaactgcgatccttagccgtcaggtgggcgtgattcgcaaacaggcgctgatccttaacttacccggtcagccgaagtctattaaagagacgctggaaggtgtgaaggacgctgagggtaacgttgtggtacacggtatttttgccagcgtaccgtactgcattcagttgctggaagggccatacgttgaaacggcaccggaagtggttgcagcattcagaccgaagagtgcaagacgcgacgttagcgaataaaaaaatccccccgagcggggggatctcaaaacaattagtgggattcaccaatcggcagaacggtgcgaccaaactgctcgttcagtacttcacccatcgccagatagattgcgctggcaccgcagatcagcccaatccagccggcaaagtggatgattgcggcgttaccggcaatgttaccgatcgccagcagggcaaacagcacggtcaggctaaagaaaacgaattgcagaacgcgtgcgcctttcagcgtgccgaagaacataaacagcgtaaatacgccccacagacccaggtagacaccaaggaactgtgcatttggcgcatcggtcagacccagtttcggcatcagcagaatcgcaaccagcgtcagccagaaagaaccgtaagaggtgaatgcggttaaaccgaaagtgttgccttttttgtactccagcagaccagcaaaaatttgcgcgatgccgccgtagaaaatgcccatggcaagaataataccgtccagagcgaaataacccacgttgtgcaggttaagcagaatggtggtcatgccgaagcccatcaggcccagcggtgccggattagccaacttagtgttgcccataattcctcaaaaatcatcatcgaatgaatggtgaaataatttccctgaataactgtagtgttttcagggcgcggcataataatcagccagtggggcagtgtctacgatcttttgaggggaaaatgaaaattttccccggtttccggtatcagacctgagtggcgctaaccatccggcgcaggcaggcgatttgcagtacggctggaatcgtcacgcgataggcgctgccgctgaccgctttaaccccatttagtgccgcacctacagggcctcccagccccgcgccgcgcagcaaaccatgcccaagtacgctcattgctgcgtgggtgcgtaaaatgcgggtcagttggctggaaagcaaatggctcacaccttttgccaataatttgtctttcatcagcagcggcagcagctcttccagctcattcaccctggcatcgaccgcgtgcagaaactcctgcttatgttcctcgtccattttcttccaggtattacgcagaaattgttccagtaactgttgctcaatttcaaacgtagacatctctttgtcggctttcagcttcaatcgcttactaacatcgagcaaaatggcccgatacaatttaccgtgtccgcgcagtttgttggcgatactatcgccaccaaaatgctgtaattctccggcaatcagctgccagttgcggcgatgttgctcgggatgcccttccatgcttttaaacagttcgttgcgcatcagtacgctggagaggcgagttttgcctttttcattatgggtgagcaatcgggcgaaatttgccaactgttcctcactacaatgctgaagaaaatccagatcactatcattcaggtaattaacattcattttttgtggcttctatattctggcgttagtcgtcgccgataattttcagcgtggccatatcgctactgttcaccgtatgaccgctaaaggtgattttactgacgcagcgtttattgtcgttatcgctgttaatgttgatccagtcagtggtttgcccttcttttatttcactaggaatattcaggctctgactggcgctacgggcggctttgaaataaacgcttgcaccgcttaactgtaaatcgccatggtcggcagagagttgtatgcgtttcacaatgcgacaaacaggaagtttcagcgccagatcgttggtttcgttacgcggcattgcaatggcgccgaggagtttatggtcgtttgcctgcgccgtgcagcacagcatcaggctaatcgccaggctggcggaaatcgtaaaaacggatttcataaggattctcttagtgggaagaggtagggggatgaatacccactagtttactgctgataaagagaagattcaggcacgtaatcttttctttttattacaattttttgatgaatgccttggctgcgattcattctttatatgaataaaattgctgtcaattttacgtcttgtcctgccatatcgcgaaatttctgcgcaaaagcacaaaaaatttttgcatctcccccttgatgacgtggtttacgaccccatttagtagtcaaccgcagtgagtgagtctgcaaaaaaatgaaattgggcagttgaaaccagacgtttcgcccctattacagactcacaaccacatgatgaccgaatatatagtggagacgtttagatgggtaaaataattggtatcgacctgggtactaccaactcttgtgtagcgattatggatggcaccactcctcgcgtgctggagaacgccgaaggcgatcgcaccacgccttctatcattgcctatacccaggatggtgaaactctagttggtcagccggctaaacgtcaggcagtgacgaacccgcaaaacactctgtttgcgattaaacgcctgattggtcgccgcttccaggacgaagaagtacagcgtgatgtttccatcatgccgttcaaaattattgctgctgataacggcgacgcatgggtcgaagttaaaggccagaaaatggcaccgccgcagatttctgctgaagtgctgaaaaaaatgaagaaaaccgctgaagattacctgggtgaaccggtaactgaagctgttatcaccgtaccggcatactttaacgatgctcagcgtcaggcaaccaaagacgcaggccgtatcgctggtctggaagtaaaacgtatcatcaacgaaccgaccgcagctgcgctggcttacggtctggacaaaggcactggcaaccgtactatcgcggtttatgacctgggtggtggtactttcgatatttctattatcgaaatcgacgaagttgacggcgaaaaaaccttcgaagttctggcaaccaacggtgatacccacctggggggtgaagacttcgacagccgtctgatcaactatctggttgaagaattcaagaaagatcagggcattgacctgcgcaacgatccgctggcaatgcagcgcctgaaagaagcggcagaaaaagcgaaaatcgaactgtcttccgctcagcagaccgacgttaacctgccatacatcactgcagacgcgaccggtccgaaacacatgaacatcaaagtgactcgtgcgaaactggaaagcctggttgaagatctggtaaaccgttccattgagccgctgaaagttgcactgcaggacgctggcctgtccgtatctgatatcgacgacgttatcctcgttggtggtcagactcgtatgccaatggttcagaagaaagttgctgagttctttggtaaagagccgcgtaaagacgttaacccggacgaagctgtagcaatcggtgctgctgttcagggtggtgttctgactggtgacgtaaaagacgtactgctgctggacgttaccccgctgtctctgggtatcgaaaccatgggcggtgtgatgacgacgctgatcgcgaaaaacaccactatcccgaccaagcacagccaggtgttctctaccgctgaagacaaccagtctgcggtaaccatccatgtgctgcagggtgaacgtaaacgtgcggctgataacaaatctctgggtcagttcaacctagatggtatcaacccggcaccgcgcggcatgccgcagatcgaagttaccttcgatatcgatgctgacggtatcctgcacgtttccgcgaaagataaaaacagcggtaaagagcagaagatcaccatcaaggcttcttctggtctgaacgaagatgaaatccagaaaatggtacgcgacgcagaagctaacgccgaagctgaccgtaagtttgaagagctggtacagactcgcaaccagggcgaccatctgctgcacagcacccgtaagcaggttgaagaagcaggcgacaaactgccggctgacgacaaaactgctatcgagtctgcgctgactgcactggaaactgctctgaaaggtgaagacaaagccgctatcgaagcgaaaatgcaggaactggcacaggtttcccagaaactgatggaaatcgcccagcagcaacatgcccagcagcagactgccggtgctgatgcttctgcaaacaacgcgaaagatgacgatgttgtcgacgctgaatttgaagaagtcaaagacaaaaaataatcgccctataaacgggtaattatactgacacgggcgaaggggaatttcctctccgcccgtgcattcatctaggggcaatttaaaaaagatggctaagcaagattattacgagattttaggcgtttccaaaacagcggaagagcgtgaaatcagaaaggcctacaaacgcctggccatgaaataccacccggaccgtaaccagggtgacaaagaggccgaggcgaaatttaaagagatcaaggaagcttatgaagttctgaccgacagccaaaaacgtgcggcatacgatcagtatggtcatgctgcgtttgagcaaggtggcatgggcggcggcggttttggcggcggcgcagacttcagcgatatttttggtgacgttttcggcgatatttttggcggcggacgtggtcgtcaacgtgcggcgcgcggtgctgatttacgctataacatggagctcaccctcgaagaagctgtacgtggcgtgaccaaagagatccgcattccgactctggaagagtgtgacgtttgccacggtagcggtgcaaaaccaggtacacagccgcagacttgtccgacctgtcatggttctggtcaggtgcagatgcgccagggattcttcgctgtacagcagacctgtccacactgtcagggccgcggtacgctgatcaaagatccgtgcaacaaatgtcatggtcatggtcgtgttgagcgcagcaaaacgctgtccgttaaaatcccggcaggggtggacactggagaccgcatccgtcttgcgggcgaaggtgaagcgggcgagcatggcgcaccggcaggcgatctgtacgttcaggttcaggttaaacagcacccgattttcgagcgtgaaggcaacaacctgtattgcgaagtcccgatcaacttcgctatggcggcgctgggtggcgaaatcgaagtaccgacccttgatggtcgcgtcaaactgaaagtgcctggcgaaacccagaccggtaagctattccgtatgcgcggtaaaggcgtcaagtctgtccgcggtggcgcacagggtgatttgctgtgccgcgttgtcgtcgaaacaccggtaggcctgaacgaaaggcagaaacagctgctgcaagagctgcaagaaagcttcggtggcccaaccggcgagcacaacagcccgcgcagtaagagcttctttgatggtgtgaagaagttttttgacgacctgacccgctaacctccccaaaagcctgcccgtgggcaggcctgggtaaaaatagggtgcgttgaagatatgcgagcacctgtaaagtggcggggatcactctacctcaatgtgtatcacaatatccatattctttgtgggggagtctggagattgagtagatattcttgttcagaatgtatcagccgatggttctacgattcttaagccacgaagagttcagatagtacaacggcatgtctcttttgactatctggcaaccggcagtgtgttctctcacgcatcacaaaagcagcaggcataaaaaaacccgcttgcgcgggctttttcacaaagcttcagcaaattggcgattaagccagtttgttgatctgtgcagtcaggttagccttatgacgtgcagctttgtttttgtggatcagacctttagcagcctgacggtccacgatcggttgcatttcgttaaatgctttctgtgcagcagctttgtcgccagcttcgatagctgcgtatactttcttgatgaaagtacgcatcatagagcgacggcttgcgttgtgcttacgagccttttcagactgaatggcgcgcttcttagcacttttgatattagccaaggtccaactcccaaatgtgttctatatggacaattcaaaggccgaggaatatgcccttttagccttcttttgtcaatggatttgtgcaaataagcgccgttaatgtgccggcacagcttacgtagtgatggcgcaggattctaccagcttgcggggtgtgaatacagcttttccgcgataaaaattgcagcaggcggtcagtttcttcccgtgatttgcgccatggcaatgaaaagccacttctttctgattagcgtactcaatcgccggttaaccttgaccgctgtacaaggtatactcggacgatttagtctgttttgagccagacatgaagctgatacgcggcatacataatctcagccaggccccgcaagaagggtgtgtgctgactattggtaatttcgacggcgtgcatcgcggtcatcgcgcgctgttacagggcttgcaggaagaagggcgcaagcgcaacttaccggtgatggtgatgctttttgaacctcaaccactggaactgtttgctaccgataaagccccggcaagactgacccggctgcgggaaaaactgcgttaccttgcagagtgtggcgttgattacgtgctgtgcgtgcgtttcgacaggcgtttcgcggcgttaaccgcgcaaaatttcatcagcgatcttctggtgaagcatttgcgcgtaaaatttcttgccgtaggtgatgatttccgctttggcgctggtcgtgaaggcgatttcttgttattacagaaagctggcatggaatacggcttcgatatcaccagtacgcaaactttttgcgaaggtggcgtgcgcatcagcagcaccgccgtgcgtcaggcccttgcggatgacaatctggctctggcagagagtttactggggcacccgtttgccatctccgggcgtgtagtccacggtgatgaattagggcgcactataggtttcccgacggcgaatgtaccgctgcgccgtcaggtttccccggtgaaaggggtttatgcggtagaagtgctgggcctcggtgaaaagccgttacccggcgtggcaaacatcggaacacgcccaacggttgccggtattcgccagcagctggaagtgcatttgttagatgttgcaatggacctttacggtcgccatatacaagtagtgctgcgtaaaaaaatacgcaatgagcagcgatttgcgagcctggacgaactgaaagcgcagattgcgcgtgatgaattaaccgcccgcgaattttttgggctaacaaaaccggcttaagcctgttatgtaatcaaaccgaaatacggaaccgagaatctgatgagtgactataaaagtaccctgaatttgccggaaacagggttcccgatgcgtggcgatctcgccaagcgcgaacccggaatgctggcgcgttggactgatgatgatctgtacggcatcatccgtgcggctaaaaaaggcaaaaaaaccttcattctgcatgatggccctccttatgcgaatggcagcattcatattggtcacagcgttaacaagattctgaaagacattatcgtgaagtccaaagggctttccggttatgacagcccgtatgtgcctggctgggactgccacggtctgccgatcgagctgaaagtcgagcaagaatacggtaagccgggtgagaaattcaccgccgccgagttccgcgccaagtgccgcgaatacgcggcgacccaggttgacggtcaacgcaaagactttatccgtctgggcgtgctgggcgactggagccacccgtacctgaccatggacttcaaaactgaagccaacatcatccgcgcgctgggcaaaatcatcggcaacggtcacctgcacaaaggcgcgaagccagttcactggtgcgttgactgccgttctgcgctggcggaagcggaagttgagtattacgacaaaacttctccgtccatcgacgttgctttccaggcagtcgatcaggatgcactgaaagcaaaatttgccgtaagcaacgttaacggcccaatcagcctggtaatctggaccaccacgccgtggactctgcctgccaaccgcgcaatctctattgcaccagatttcgactatgcgctggtgcagatcgacggtcaggccgtgattctggcgaaagatctggttgaaagcgtaatgcagcgtatcggcgtgaccgattacaccattctcggcacggtaaaaggtgcggagcttgagctgctgcgctttacccatccgtttatgggcttcgacgttccggcaatcctcggcgatcacgttaccctggatgccggtaccggtgccgttcacaccgcgcctggccacggcccggacgactatgtgatcggtcagaaatacggcctggaaaccgctaacccggttggcccggacggcacttatctgccgggcacttatccgacgctggatggcgtgaacgtcttcaaagcgaacgacatcgtcgttgcgctgctgcaggaaaaaggcgcgctgctgcacgttgagaaaatgcagcacagctatccgtgctgctggcgtcacaaaacgccgatcatcttccgcgcgacgccgcagtggttcgtcagcatggatcagaaaggtctgcgtgcgcagagtctgaaagagatcaaaggcgtgcagtggatcccggactggggccaggcgcgtatcgagagcatggttgctaaccgtcctgactggtgtatctcccgtcagcgcacctggggtgtaccgatgagtctgttcgtgcacaaagacacggaagagctgcatccgcgtacccttgaactgatggaagaagtggcaaaacgcgttgaagtcgatggcatccaggcgtggtgggatctcgatgcgaaagagatcctcggcgacgaagctgatcagtacgtgaaagtgccggacacattggatgtatggtttgactccggatctacccactcttctgttgttgacgtgcgtccggaatttgccggtcacgcagcggacatgtatctggaaggttctgaccaacaccgcggctggttcatgtcttccctaatgatctccaccgcgatgaagggtaaagcgccgtatcgtcaggtactgacccacggctttaccgtggatggtcagggccgcaagatgtctaaatccatcggcaataccgttagcccgcaggatgtgatgaacaaactgggcgcggatattctgcgtctgtgggtggcaagtaccgactacaccggtgaaatggccgtttctgacgagatcctgaaacgtgctgccgatagctatcgtcgtatccgtaacaccgcgcgcttcctgctggcaaacctgaacggttttgatccagcaaaagatatggtgaaaccggaagagatggtggtactggatcgctgggccgtaggttgtgcgaaagcggcacaggaagacatcctcaaggcgtacgaagcatacgatttccacgaagtggtacagcgtctgatgcgcttctgctccgttgagatgggttccttctacctcgacatcatcaaagaccgtcagtacaccgccaaagcggacagtgtggcgcgtcgtagctgccagactgcgctatatcacatcgcagaagcgctggtgcgctggatggcaccaatcctctccttcaccgctgatgaagtgtggggctacctgccgggcgaacgtgaaaaatacgtcttcaccggtgagtggtacgaaggcctgtttggcctggcagacagtgaagcgatgaacgatgcgttctgggacgagctgttgaaagtgcgtggcgaagtgaacaaagtcattgagcaagcgcgtgccgacaagaaagtgggtggcagcctggaagcggcagtaaccttgtatgcagaaccggaactgagcgcgaaactgaccgcgctgggcgatgaattacgatttgtcctgttgacctccggcgctaccgttgcagactataacgacgcacctgctgatgctcagcagagcgaagtactcaaagggctgaaagtcgcgttgagtaaagccgaaggtgagaagtgcccacgctgctggcactacacccaggatgtcggcaaggtggcggaacacgcagaaatctgcggccgctgtgtcagcaacgtcgccggtgacggtgaaaaacgtaagtttgcctgatgagtcaaagcatctgtagtacagggctacgctggctgtggctggtggtagtcgtgctgattatcgatctgggcagcaaatacctgatcctccagaactttgctctgggggatacggtcccgctgttcccgagccttaatctgcattatgcgcgtaactatggcgcggcgtttagtttccttgccgatagcggcggctggcagcgttggttctttgccggtattgcgattggtattagcgtgatcctggcagtgatgatgtatcgcagcaaggccacgcagaagctaaacaatatcgcttacgcgctgattattggcggcgcgctgggcaacctgttcgaccgcctgtggcacggcttcgttgtcgatatgatcgacttctacgtcggcgactggcacttcgccaccttcaaccttgccgatactgccatctgtgtcggtgcggcactgattgtgctggaaggttttttgccttctagagcgaaaaaacaataataaaccctgccggatgcgatgctgacgcatcttatccggcctacagattgctgcgaaatcgtaggccggataaggcgtttacgccgcatccggcaaaaatccttaaatataagagcaaacctgcatgtctgaatctgtacagagcaatagcgccgtcctggtgcacttcacgctaaaactcgacgatggcaccaccgccgagtctacccgcaacaacggtaaaccggcgctgttccgcctgggtgatgcttctctttctgaagggctggagcaacacctgttggggctgaaagtgggcgataaaaccaccttcagcttggagccagatgcggcgtttggcgtgccgagtccggacctgattcagtacttctcccgccgtgaatttatggatgcaggcgagccagaaattggcgcaatcatgctttttaccgcaatggatggcagtgagatgcctggcgtgatccgcgaaattaacggcgactccattaccgttgatttcaaccatccgctggccgggcagaccgttcattttgatattgaagtgctggaaatcgatccggcactggaggcgtaacatgcagatcctgttggccaacccgcgtggtttttgtgccggggtagaccgcgctatcagcattgttgaaaacgcgctggccatttacggcgcaccgatatatgtccgtcacgaagtggtacataaccgctatgtggtcgatagcttgcgtgagcgtggggctatctttattgagcagattagcgaagtaccggacggcgcgatcctgattttctccgcacacggtgtttctcaggcggtacgtaacgaagcaaaaagtcgcgatttgacggtgtttgatgccacctgtccgctggtgaccaaagtgcatatggaagtcgcccgcgccagtcgccgtggcgaagaatctattctcatcggtcacgccgggcacccggaagtggaagggacaatgggccagtacagtaacccggaagggggaatgtatctggtcgaaagcccggacgatgtgtggaaactgacggtcaaaaacgaagagaagctctcctttatgacccagaccacgctgagcgtggatgacacgtctgatgtgatcgacgcgctgcgtaaacgcttcccgaaaattgtcggtccgcgcaaagatgacatctgctacgccacgactaaccgtcaggaagcggtacgcgccctggcagaacaggcggaagttgtgttggtggtcggtagcaaaaactcctccaactccaaccgtctggcggagctggcccagcgtatgggcaaacgcgcgtttttgattgacgatgcgaaagacatccaggaagagtgggtgaaagaggttaaatgcgtcggcgtgactgcgggcgcaagcgctccggatattctggtgcagaatgtggtggcacgtttgcagcagctgggcggtggtgaagccattccgctggaaggccgtgaagaaaacattgttttcgaagtgccgaaagagctgcgtgtcgatattcgtgaagtcgattaagtcattagcagcctaagttatgcgaaaatgccggtcttgttaccggcattttttatggagaaaacatgcgtttacctatcttcctcgatactgaccccggcattgacgatgccgtcgccattgccgccgcgatttttgcacccgaactcgacctgcaactgatgaccaccgtcgcgggtaatgtcagcgttgagaaaactacccgcaatgccctgcaactgctgcatttctggaatgcggagattccgctcgcccaaggggccgctgtgccactggtacgcgcaccgcgtgatgcggcatctgtgcacggcgaaagcggaatggctggctacgactttgttgagcacaaccgaaagccgctcgggataccggcgtttctggcgattcgggatgccctgatgcgtgcaccagagcctgttaccctggtggccatcggcccgttaaccaatattgcgctgttacttagtcaatgcccggaatgcaagccgtatattcgccgtctggtgatcatgggtggttctgccggacgcggcaactgtacgccaaacgccgagtttaatattgctgccgatccagaagctgctgcctgtgtcttccgcagtggtattgaaatcgtcatgtgcggtttggatgtcaccaatcaggcaatattaactcctgactatctctctacactgccgcagttaaaccgtaccgggaaaatgcttcacgccctgtttagccactaccgtagcggcagtatgcaaagcggcttgcgaatgcacgatctctgcgccatcgcctggctggtgcgcccggacctgttcactctcaaaccctgttttgtggcagtggaaactcagggcgaatttaccagtggcacgacggtggttgatatcgacggttgcctgggcaagccagccaatgtacaggtggcattggatctggatgtgaaaggcttccagcagtgggtggctgaggtgctggctctggcgagctaacctgtcacatgttattggcatgcagtcattcatcgactcatgcctttcactgatatccctccctgtttatcattaatttctaattatcagcgtttttggctggcggcgtagcgatgcgctggttactctgaaaacggtctatgcaaattaacaaaagagaatagctatgcatgatgcaaacatccgcgttgccatcgcgggagccggggggcgtatgggccgccagttgattcaggcggcgctggcattagagggcgtgcagttgggcgctgcgctggagcgtgaaggatcttctttactgggcagcgacgccggtgagctggccggagccgggaaaacaggcgttaccgtgcaaagcagcctcgatgcggtaaaagatgattttgatgtgtttatcgattttacccgtccggaaggtacgctgaaccatctcgctttttgtcgccagcatggcaaagggatggtgatcggcactacggggtttgacgaagccggtaaacaagcaattcgtgacgccgctgccgatattgcgattgtctttgctgccaattttagcgttggcgttaacgtcatgcttaagctgctggagaaagcagccaaagtgatgggtgactacaccgatatcgaaattattgaagcacatcatagacataaagttgatgcgccgagtggcaccgcactggcaatgggagaggcgatcgcccacgcccttgataaagatctgaaagattgcgcggtctacagtcgtgaaggccacaccggtgaacgtgtgcctggcaccattggttttgccaccgtgcgtgcaggtgacatcgttggtgaacataccgcgatgtttgccgatattggcgagcgtctggagatcacccataaggcgtccagccgtatgacatttgctaacggcgcggtaagaagcgctttgtggttgagtggtaaggaaagcggtctttttgatatgcgagatgtacttgatctcaataatttgtaaccacaaaatatttgttatggtgcaaaaataacacatttaatttattgattataaagggctttaatttttggcccttttatttttggtgttatgtttttaaattgtctataagtgccaaaaattacatgttttgtcttctgtttttgttgttttaatgtaaattttgaccatttggtccacttttttctgctcgtttttatttcatgcaatcttcttgctgcgcaagcgttttccagaacaggttagatgatctttttgtcgcttaatgcctgtaaaacatgcatgagccacaaaataatataaaaaatcccgccattaagttgacttttagcgcccatatctccagaatgccgccgtttgccagaaattcgtcggtaagcagatttgcattgatttacgtcatcattgtgaattaatatgcaaataaagtgagtgaatattctctggagggtgttttgattaagagtgcgctattggttctggaagacggaacccagtttcacggtcgggccataggggcaacaggtagcgcggttggggaagtcgttttcaatactagtatgaccggttatcaagaaatcctcactgatccttcctattctcgtcaaatcgttactcttacttatccccatattggcaatgtcggcaccaatgacgccgatgaagaatcttctcaggtacatgcacaaggtctggtgattcgcgacctgccgctgattgccagcaacttccgtaataccgaagacctctcttcttacctgaaacgccataacatcgtggcgattgccgatatcgatacccgtaagctgacgcgtttactgcgcgagaaaggcgcacagaatggctgcattatcgcgggcgataacccggatgcggcgctggcgttagaaaaagcccgcgcgttcccaggtctgaatggcatggatctggcaaaagaagtgaccaccgcagaagcctatagctggacacaagggagctggacgttgaccggtggcctgccagaagcgaaaaaagaagacgagctgccgttccacgtcgtggcttatgattttggtgccaagcgcaacatcctgcggatgctggtggatagaggctgtcgcctgaccatcgttccggcgcaaacttctgcggaagatgtgctgaaaatgaatccagacggcatcttcctctccaacggtcctggcgacccggccccgtgcgattacgccattaccgccatccagaaattcctcgaaaccgatattccggtattcggcatctgtctcggtcatcagctgctggcgctggcgagcggtgcgaagactgtcaaaatgaaatttggtcaccacggcggcaaccatccggttaaagatgtggagaaaaacgtggtaatgatcaccgcccagaaccacggttttgcggtggacgaagcaacattacctgcaaacctgcgtgtcacgcataaatccctgttcgacggtacgttacagggcattcatcgcaccgataaaccggcattcagcttccaggggcaccctgaagccagccctggtccacacgacgccgcgccgttgttcgaccactttatcgagttaattgagcagtaccgtaaaaccgctaagtaatcaggagtaaaagagccatgccaaaacgtacagatataaaaagtatcctgattctgggtgcgggcccgattgttatcggtcaggcgtgtgagtttgactactctggcgcgcaagcgtgtaaagccctgcgtgaagagggttaccgcgtcattctggtgaactccaacccggcgaccatcatgaccgacccggaaatggctgatgcaacctacatcgagccgattcactgggaagttgtacgcaagattattgaaaaagagcgcccggacgcggtgctgccaacgatgggcggtcagacggcgctgaactgcgcgctggagctggaacgtcagggcgtgttggaagagttcggtgtcaccatgattggtgccactgccgatgcgattgataaagcagaagaccgccgtcgtttcgacgtagcgatgaagaaaattggtctggaaaccgcgcgttccggtatcgcacacacgatggaagaagcgctggcggttgccgctgacgtgggcttcccgtgcattattcgcccatcctttaccatgggcggtagcggcggcggtatcgcttataaccgtgaagagtttgaagaaatttgcgcccgcggtctggatctctctccgaccaaagagttgctgattgatgagagcctgatcggctggaaagagtacgagatggaagtggtgcgtgataaaaacgacaactgcatcatcgtctgctctatcgaaaacttcgatgcgatgggcatccacaccggtgactccatcactgtcgcgccagcccaaacgctgaccgacaaagaatatcaaatcatgcgtaacgccagcatggcggtgctgcgtgaaatcggcgttgaaaccggtggttccaacgttcagtttgcggtgaacccgaaaaacggtcgtctgattgttatcgaaatgaacccacgcgtgtcccgttctagcgcgctggcgagcaaagcgaccggtttcccgattgctaaagtggcggcgaaactggcggtgggttacaccctcgacgaactgatgaacgacatcactggcggacgtactccggcctccttcgagccgtccatcgactatgtggttactaaaattcctcgcttcaacttcgaaaaattcgccggtgctaacgaccgtctgaccactcagatgaaaagcgttggcgaagtgatggcgattggtcgcacgcagcaggaatccctgcaaaaagcgctgcgcggcctggaagtcggtgcgactggattcgacccgaaagtgagcctggatgacccggaagcgttaaccaaaatccgtcgcgaactgaaagacgcaggcgcagatcgtatctggtacatcgccgatgcgttccgtgcgggcctgtctgtggacggcgtcttcaacctgaccaacattgaccgctggttcctggtacagattgaagagctggtgcgtctggaagagaaagtggcggaagtgggcatcactggcctgaacgctgacttcctgcgccagctgaaacgcaaaggctttgccgatgcgcgcttggcaaaactggcgggcgtacgcgaagcggaaatccgtaagctgcgtgaccagtatgacctgcacccggtttataagcgcgtggatacctgtgcggcagagttcgccaccgacaccgcttacatgtactccacttatgaagaagagtgcgaagcgaatccgtctaccgaccgtgaaaaaatcatggtgcttggcggcggcccgaaccgtatcggtcagggtatcgaattcgactactgttgcgtacacgccagcctggcgctgcgcgaagacggttacgaaaccattatggttaactgtaacccggaaaccgtctccaccgactacgacacttccgaccgcctctacttcgagccggtaactctggaagatgtgctggaaatcgtgcgtatcgagaagccgaaaggcgttatcgtccagtacggcggtcagaccccgctgaaactggcgcgcgcgctggaagctgctggcgtaccggttatcggcaccagcccggatgctatcgaccgtgcagaagaccgtgaacgcttccagcatgcggttgagcgtctgaaactgaaacaaccggcgaacgccaccgttaccgctattgaaatggcggtagagaaggcgaaagagattggctacccgctggtggtacgtccgtcttacgttctcggcggtcgggcgatggaaatcgtctatgacgaagctgacctgcgtcgctacttccagacggcggtcagcgtgtctaacgatgcgccagtgttgctggaccacttcctcgatgacgcggtagaagttgacgtggatgccatctgcgacggcgaaatggtgctgattggcggcatcatggagcatattgagcaggcgggcgtgcactccggtgactccgcatgttctctgccagcctacaccttaagtcaggaaattcaggatgtgatgcgccagcaggtgcagaaactggccttcgaattgcaggtgcgcggcctgatgaacgtgcagtttgcggtgaaaaacaacgaagtctacctgattgaagttaacccgcgtgcggcgcgtaccgttccgttcgtctccaaagccaccggcgtaccgctggcaaaagtggcggcgcgcgtgatggctggcaaaagcctggctgagcagggcgtaaccaaagaagttatcccgccgtactacagcgtgaaagaagtggtgctgccgttcaataaattcccgggcgttgacccgctgttagggccagaaatgcgctctaccggggaagtcatgggcgtgggccgcaccttcgctgaagcgtttgccaaagcgcagctgggcagcaactccaccatgaagaaacacggtcgtgcgctgctttccgtgcgcgaaggcgataaagaacgcgtggtggacctggcggcaaaactgctgaaacagggcttcgagctggatgcgacccacggcacggcgattgtgctgggcgaagcaggtatcaacccgcgtctggtaaacaaggtgcatgaaggccgtccgcacattcaggaccgtatcaagaatggcgaatatacctacatcatcaacaccaccagtggccgtcgtgcgattgaagactcccgcgtgattcgtcgcagtgcgctgcaatataaagtgcattacgacaccaccctgaacggcggctttgccaccgcgatggcgctgaatgccgatgcgactgaaaaagtaattagcgtgcaggaaatgcacgcacagatcaaataatagcgtgtcatggcagatatttttcatccgctaatttgatcgaataactaatacggttctctgatgaggaccgtttttttttgcccattaagtaaatcttttggggaatcgatatttttgatgacataagcaggatttagctcacacttatcgacggtgaagttgcatactatcgatatatccacaattttaatatggccttgtttaattgcttcaaaacgagtcatagccagacttttaatttgtgaaactggagttcgtatgtgtgaaggatatgttgaaaaaccactctacttgttaatcgccgaatggatgatggctgaaaatcggtgggtgatagcaagagagatctctattcatttcgatattgaacacagcaaggcggttaataccctgacttatattctgagcgaagtcacagaaataagctgcgaagttaagatgatccctaataagctggaagggcggggatgccagtgtcagcgactggttaaagtggtcgatatcgatgagcaaatttacgcgcgcctgcgcaataacagtcgggaaaaattagtcggtgtaagaaagacgccgcgtattcctgccgttccgctcacggaacttaaccgcgagcagaagtggcagatgatgttgagtaagagtatgcgtcgttaattttatctcgttgataccgggcgtcctgcttgccagatgcgatgttgtagcatcttatccagcaaccaggtcgcatccggcaagatcaccgtttaggcgtcacatccgtcgtcccctgcaaacgggggcgattttcctccatttgcctcagtggctgcgtttcatgtaagcttacatgacagcgcccgacaagatcctgatactctttggtattcaaccgtttccagtgtaactcgtcgtcactaacattgcgtacagcgcgggctggcgtacccatcaacaactggcgtttctcgccgcgaaagcccgctttgacaaagctcatggcggcaacaatgctctcttcgccaatgaccgcgccatccataatcacgctgttcatcccgaccaatgcatcgcgaccaatcaaacaaccatgcaggatcgctccgtgcccgatatggccgttttccccaacgatagtgtcagtgtcgcagtagccatgcataatgcagccatcctgaatattggctcccgcttgcacgatcaaccgcccgtagtcaccacgcagactggcgagtgggccgatgtagacaccggctcccacaatcacatcgccaatcaagacggcactgggatggacaaacgccgtcgggtgaaccaccggaattaacccctcaaaggcgtaatagctcacggttgttaacgtcctttccacaccggatcgcgcttctcggcaaacgccagcggcccttcaatggcatcttcgctatgcagaacgcttggatagtgtttcaacacgccgctgcgaatatagcgatacgcttcttctaccggcatttcgctggtggtgcggtagatctctttcagcgccgcaatcgccagcggggcgctgttaaccagctgctgagccagttcgcgggcgttatccatcagttccgcctggctaaccacgcggttgactatcccccaacgcagcgcctcttctgcgcccattcgtctgccggtcatcaccatttcattgacgatggcaggcggcaggatcttcggcagacgcagcacaccgccgctgtcaggaacgatgcccagtttggcttccggcagggcgaagctggcgttatcggcacaaacaataaaatctgccgccagcgccagttcaaagccgccgccaaaggcatagccgttcacagctgcgataaccggtttgtcgagattgaaaatttcggttaatcccgcaaaaccacccggaccaaagtcagcatccggtgcttcgccttctgctgccgcttttaaatcccagcccgcggaaaagaacttctctccggcaccggtaataatggcgacacgtaattgcggatcgtcacggaaatttagaaatacttcgcccatttcaaagctggtttttgcatcaatagcattcgcttttggacgatcaagggtaatttccagaatacttccattgcgggtcagatgtaaactttcactcattccttttctccatttttgctttttcagggagctcaacatccctgcaaaaaatgcatattgttttagagtgtgattattagctggcagggtagttccctgctgtttcatttatttcagattctttctaattattttcccgctgcaattacgtggcagatcttttctgatctccagataagagggcactttaaatttcgccatattttgttcgcagaagcggaaaaattcctcttcgctcaatgtttcaccttcattcagcaccacaaatgctttgatggcttcatcgcgaatgctatctttaatacccacaaccacgatgtcctgaattttcgggtgcgcggcgataatattttccagctccacgcaggagacattctcgccgccacgtttaatcatattgcagcggcgatcgacgaaataaaaaaagtcctcttcgtcgcggtatccggtatcgccggtatgcagccagccatcggcttccagcactttcgcagtggcttgtgggttgagaaagtactctttgaagatggttttcccaggtatgcctttaatgcagatttcaccgatctcaccagccgggagcgggcgattgtgatcgtcgcggatctccgcttcgtagcaaaaccccacccgaccaatgctcggccagcgtcgtttatcgccaggacgatcgccgataatgcccacaatggtttccgtcatcccataagacgtcagcaagcgaacgccgaagcgttcacaaaacgcatctttttcctgctcgctcaagttgagataaaacatcacttcccgcaggcggtgttgctgatcgttcgcactaggcggctgtaccatcaacgtacggatcatcatcggaatacattcggtaacggtggcgcggtacttctgtacctgtccccagaaggcgcgggcgctgtatttctcgaccagcacaaaggtggccccggcagaaaacgccgccatcgccgcagtacactggcaatcgatatgaaacgcaggcattaccgtcaggtagacgtcatcgtcacgcagtgcacactgccaggcggagtaatatccagcgaagcgcaggttgtaatgggtaatcaccacacctttcggtcgggaggtggtgccggaggtgaagagaatttccgccgtatcgtcagtgcttagcggcggtgcatagcacaaggtggcaggttgttgatttttcagttgagtaaagctactcacgccatcatcagcgggaagtgccacatctgtcaggcaaatgtgccgcaattgagtggcatcttcctgctgaatctgttgatacataggatagaattgcgcactggtcaccagcaggcacgcctggctattttgcaggatccacgcgctttcctcgcacaacaggcgggcgttaatcggcaccataatcgcgccaatttttgccagcccgaaccagcaaaagataaattccgggcagttgtcgagatgtagtgcaaccttgtcgcctttgcgaatccccagcgtataaaacaggtttgccgtgcggttaatctcctgatttaactcaagataactataccggttaacgactccgccgctggattcacaaatcagcgccgttttatgaccgtaaacgtccgcaagatcgtcccacatttgacgtagatgttgtccgccaatgatatccattgcacctctatccatttttgttcgtttgttattgggcgggcgctagtcaggcaagccgactgacgccacgcgtttagtcctcaactttggccagacctttgctgaccaactcctgaatgtcgttttcgctgtagccgatatttttcaaaatggcagccgtgtccatgccatgactgggcattccgcgccagatttgtccggggttatttttgaatttcggcatgatgttcggccctttgcaggtgcgaccatccatcgtttgccactgagtgatactttcgcgagccacatactgtggattgctttccagttccggtacggtcagcactttggcgcaggcgatattcagttcagcaaagcgttcttttacttccgcgatggtatgtgtcgccagccaggcatcgagtttctcttcaaccagtgggccgtaagggcattcgatacggtggataagctgagtgccttccgggatttctggcgtgccaagcagatgtgcgaggccaatatctttaaagcactcttcaatttgggtaatgcccaccagttccatcacgatgtagccgtcggcacatttatacagaccgcaaccggcgtagtagggatctttacctttgctcatgcgcgggcacatttcgccgccgttgaagtaatccatcatgaagtactggcccatacgcagcatcacttcatacatggcgatgtcgatactttcgcctttaccggtttcacgcactttatgcagtgctgccagcgccgccgtggtggcggtcaggccagaaaagtaatcggcggtatacgggaaggcaggcattggctggtcaacatcaccgttctgaatcaggtaaccactaaaggcctgggcgatagtgttataggccggaagattggtgtactcctcggtgccgtactgaccaaaaccggacaggtgagcgataaccagtttcgggttgtgctgccacagtacttcatcggtaatgccacgacgggcaaaggccggacctttactggcttcgatgaagatatcggtggtttccattaatttcagaaacgcttcgcggccttcatctttgaaaatatttaagctcagcgcgtgcaaattgcggcgggagagttgcgggtagttcggttgaacgcgaatggtgtcggcccaggcgacgttctcgatccagataacttccgcgccccattctgcgaacatttgcccggcaaacggtccggcgatttcgataccggagaagacaacgcgcaatccggccaacggcccgaatttcggcatgggtagatgatccattatttgctcctgaaaaatttatgtagcgcatgactgccggatgcggcgtaaacgctttatccggcctacattcgtgctcccgtaggcctgataagacgcatcagcgtcgcatcaggcagcgcacggacttagcggtattgcttcagcaccgcacgacccagcgtcaggatctgcatttcgtcagatcccccggagacgcggtctacacgcagatcacgccagaagcggctgatgcggtggttgcccgcaatcccgacaccgcccagcacctgcattgcgctatccacaacttcaaatgccgcattggcgcagaagtatttgcacatcgctgcatcgccagaggtgatggtgccgttgtctgctttccacgctgcttcatacagcatgtttttcatggagtttaatttgatcgccatgtgggcgaatttttcctgaatcaactggaaacgaccaatagcctcgccaaactgcacgcgctgattggcgtagcgcgccgcatcttcaaaggcgcacatcgccgtaccgtagttggtgagggctaccaggaaacgttcatggtcgaactcttctttgacgcggttaaagccgttaccttcccgaccgaacatgtctttctcgtccagttccacgtcgtcaaaggtgatttcacagcagctatccatacgcagaccgagcttttcaagtttggtcactttgatgcccggtttgctcatatcaacaaaccattcggtgtagacaggtttgtccggagaagccccgtcgcgcgccatcaccacgatgtacggggtgtaggcgctgctggtaataaaacacttactaccattaagataaatcttaccatttctacgggtataagtcgttttcaggctacccacgtcggagcccgcgcccggttcggtaatcgcactgttccacatctgcttaccggtgccgcggaaagccataattttgtcgatctgctcttgtgtgccttcgcgcaggaaggtgttgaacccgcccggcaactggtacagcacataggttggtgcccccagacgtcccagctccatccacacggcggcgagagtaacaaaccccgcgtccagaccaccgtgctcttcagggatcagcagactgtcgatacccatatccgccagtgctttgacaaaacgttccgggtagacgctgtcacggtcgcactcggcaaaataggcctcccagttttcgctggccatcagttcgcggataccggcgacaaacagttcctgctcatcatttaaattaaaatccatctttcaacctcttgatattttgggggttaattaatctttccagttctgtttcgcgtctttaataaaggagagcgtcaccataatgttgacgaagaacagcgggcatcctccggcgataatggcggtttgaatcggtttcaggccgccgagcgccagcagaacaataccgataatgccaaccagaatactccaaccgatacgcaccagcagaggtggttcttcaccatcgcgtacttcgcggcaagtggacatcgccagggtataagagcaggcgttaaccagcgtaacggtggcaataaagcagaggatgaagaagccccacatggtggcggtgctgagtggcagagcggcccaggtttcaatgatggcgcgcgccacaccgtactgttcgatcagatttggaatgttgatgatgtttttatctatcaacagcagagtgttactaccgagtacagtccacaggatccaggtactcgctgtcagccccagcaccatgccgaagcacagttcacgcacagtacgaccacgggagatgcgggcgaggaagatactcatctggatagcataaatcacccaccatgcccagtagaacacggtccagccctgcgggaagccgcctttagcgatgggatcggtatagaacaacatgcgcggcagatacatcagcaacatccccacgctatcggtgaagtagttcatgatgaagctggcaccgctgacaatgaacacccaacccagcatcaggaagctcaggtaactacgcacgtcactggcgatacgtacccctttttgcagaccgcaagcgacgcaaatggcgttgaggataatccagcaggtaatgatgatagcgtccagttgcagggtatgcggaatgccaaacaaccattgcatacactcggtcaccagcggcgtggcaaggcccagactggtacccatcgcgaagatcaaggcgacgagatagaagttgtcgacgatagtgccgaacaaccctttggcgtgtttttcacctaccagcggcaccagtgtgctgctggggcgaatcacttccattttgcggacaaagaagaagtaagcgaaggcgacactaaggaagctgtaagtggcccacggcagaggtccccagtggaacaagctgtaagccagccccaactctttcgcccctgtgctgttcggttctaagccaaacggcggggtggagatgtagtagtagatctcaatgcttccccagaacagtacggcagcagacgtacaggaggcgaacatcataaagatccaactggcggtgctaaattctggcggttcgttacctaaacgctttttggcatacgggccaaacaccagccagaaccaaccgaaaagcatcaccaccatataccattcaaatgcccatccccatacattggtgacgtaactgaatacagcattaataacgacattcgctgcatccagatctctgactgtaagccaacaaagtatgccgacgattattaacggcggaaagaaaaccttcggttctattcccgtttttctcttttcattcttcatgagttaattccactgtgaaaacgaatatttattttgcgttcccgtttgttttatttttgttaacatttaatataattattattaacctcgtggacgcgttaatggctaactcataatgggtattcaataagctgtattctgtgattggtatcacatttttgtttcgggtgaatagagggcgttttttcgttaattttgattaataatcagtttgttatgctctgttgtgagtaaaaaataacatctgactttcaatattggtgatccataaaacaatattgaaaatttctttttgctacgccgtgttttcaatattggtgaggaacttaacaatattgaaagttggatttatctgcgtgtgacattttcaatattggtgattaaagttttatttcaaaattaaagggcgtgatatctgtaattaacaccaccgatatgaacgacgtttccttcatgatttctggagatgcaatgaagattattacttgctataagtgcgtgcctgatgaacaggatattgcggtcaataatgctgatggtagtttagacttcagcaaagccgatgccaaaataagccaatacgatctcaacgctattgaagcggcttgccagctaaagcaacaggcagcagaggcgcaggtgacagccttaagtgtgggcggtaaagccctgaccaacgccaaagggcgtaaagatgtgctaagccgcggcccggatgaactgattgtggtgattgatgaccagttcgagcaggcactgccgcaacaaacggcgagcgcactggctgcagccgcccagaaagcaggctttgatctgatcctctgtggcgatggttcttccgacctttatgcccagcaggttggtctgctggtgggcgaaatcctcaatattccggcagttaacggcgtcagcaaaattatctccctgacggcagataccctcaccgttgagcgcgaactggaagatgaaaccgaaaccttaagcattccgctgcctgcggttgttgctgtttccactgatatcaactccccacaaattcctagcatgaaagccattctcggcgcggcgaaaaagcccgtccaggtatggagcgcggcggatattggttttaacgcagaggcagcctggagtgaacaacaggttgccgcgccgaaacagcgcgaacgtcagcgcatcgtgattgaaggcgacggcgaagaacagatcgccgcatttgctgaaaatcttcgcaaagtcatttaattacaggggatgctatgaacacgttttctcaagtctgggtattcagcgataccccttctcgtctgccggaactgatgaacggtgcgcaggctttagctaatcaaatcaacacctttgtcctcaatgatgccgacggcgcacaggcaatccagctcggcgctaatcatgtctggaaattaaacggcaaaccggacgatcggatgatcgaagattacgccggtgtcatggctgacactattcgccagcacggcgcagacggcctggtgctgctgccaaacacccgtcgcggcaaattactggcggcaaaactgggttatcgccttaaagcggcggtgtctaacgatgccagcaccgtcagcgtacaggacggtaaagcgacagtgaaacacatggtttacggtggtctggcgattggcgaagaacgcattgccacgccgtatgcggtactgaccatcagcagcggcacgttcgatgcggctcagccagacgcgagtcgcactggcgaaacgcacaccgtggagtggcaggctccggctgtggcgattacccgcacggcaacccaggcgcgccagagcaacagcgtcgatctcgacaaagcccgtctggtggtcagcgtcggtcgcggtattggcagcaaagagaacattgcgctggcagaacagctttgcaaggcgataggtgcggagttggcctgttctcgtccggtggcggaaaacgaaaaatggatggagcacgaacgctatgtcggtatctccaacctgatgctgaaacctgaactgtacctggcggtggggatctccgggcagatccagcacatggttggcgctaacgcgagccaaaccattttcgccatcaataaagataaaaatgcgccgatcttccagtacgcggattacggcattgttggcgacgccgtgaagatccttccggcgctgaccgcagctttagcgcgttgatccactctggcagggctgcattttggccctgccgctgacagggagctcttatgtccgaagatatctttgacgccatcatcgtcggtgcagggcttgccggtagcgttgccgcactggtgctcgcccgcgaaggtgcgcaagtgttagttatcgagcgtggcaattccgcaggtgccaagaacgtcaccggcgggcgtctctatgcccacagtctggaacacattattcctggtttcgccgactccgcccccgtagaacgcctgatcacccatgaaaaactcgcgtttatgacggaaaagagtgcgatgactatggactactgcaatggtgacgaaaccagcccatcccagcgttcttactccgttttgcgcagtaaatttgatgcctggctgatggagcaggccgaagaagcgggcgcgcagttaattaccgggatccgcgtcgataacctcgtacagcgcgatggcaaagtcgtcggtgtagaagccgatggcgatgtgattgaagcgaaaacggtgatccttgctgatggggtgaactccatccttgccgaaaaattggggatggcaaaacgcgtcaaaccgacggatgtggcggttggcgtgaaggaactgatcgagttaccgaagagcgttattgaagaccgttttcagttgcagggtaatcagggggcggcttgcctgtttgcgggaagtcccaccgatggcctgatgggcggcggcttcctttataccaatgaaaacaccctgagcctggggctggtttgtggtttgcatcatctgcatgacgcgaaaaaaagcgtgccgcaaatgctggaagatttcaaacagcatccggccgttgcaccgctgatcgcgggcggcaagctggtggaatattccgctcacgtagtgccggaagcaggcatcaacatgctgccggagttggttggtgacggcgtattgattgccggtgatgccgccggaatgtgtatgaacctcggttttaccattcgcggtatggatctggcgattgccgccggggaagccgcagcaaaaaccgtgcttagtgcgatgaaaagcgacgatttcagtaagcaaaaactggcggaatatcgtcagcatcttgagagtggtccgctgcgcgatatgcgtatgtaccagaaactaccggcgttccttgataacccacgcatgtttagcggctacccggagctggcggtgggtgtggcgcgtgacctgttcaccattgatggcagcgcgccggaactgatgcgcaagaaaatcctccgccacggcaagaaagtgggcttcatcaatctaatcaaggatggcatgaaaggagtgaccgttttatgacttctcccgtcaatgtggacgtcaaactgggcgtcaataaattcaatgtcgatgaagagcatccgcacattgttgtgaaggccgatgctgataaacaggcgctggagctgctggtgaaagcgtgccccgcaggtctgtacaagaagcaggatgacggcagtgtgcgcttcgattacgccggatgtctggagtgcggcacctgtcgcattctggggctggggagcgcgctggaacagtgggaatacccgcgcggcacctttggtgtggagttccgttacggctgatgttggtttgatacgtaacgccgcactgactctcattgcaaaaaacaggaataaccatgcaaccgtccagaaactttgacgatctcaaattctcctctattcaccgccgcattttgctgtggggaagcggtggtccgtttctggatggttatgtactggtaatgattggcgtggcgctggagcaactgacgccggcgctgaaactggacgctgactggattggcttgctgggcgcgggaacgctcgccgggctgttcgttggcacaagcctgtttggttatatttccgataaagtcggacggcgcaaaatgttcctcattgatatcatcgccatcggcgtgataagcgtggcgacgatgtttgttagttcccccgtcgaactgttggtgatgcgggtacttatcggcattgtcatcggtgcagattatcccatcgccaccagtatgatcaccgagttctccagtacccgtcagcgggcgttttccatcagctttattgccgcgatgtggtatgtcggcgcgacctgtgccgatctggtcggctactggctttatgatgtggaaggcggctggcgctggatgctgggtagcgcggcgatcccctgtttgttgattttgattggtcgattcgaactgcctgaatctccccgctggttattacgcaaagggcgagtaaaagagtgcgaagagatgatgatcaaactgtttggcgaaccggtggctttcgatgaagagcagccgcagcaaacccgttttcgcgatctgtttaatcgccgccattttccttttgttctgtttgttgccgccatctggacctgccaggtgatcccaatgttcgccatttacacctttggcccgcaaatcgttggtttgttgggattgggggttggcaaaaacgcggcactagggaatgtggtgattagcctgttctttatgctcggctgtattccgccgatgctgtggttaaacactgccggacggcgtccattgttgattggcagctttgccatgatgacgctggcgctggcggttttggggctaatcccggatatggggatctggctggtagtgatggcctttgcggtgtatgcctttttctctggcgggccgggtaatttgcagtggctctatcctaatgaactcttcccgacagatatccgcgcctctgccgtgggcgtgattatgtccttaagtcgtattggcaccattgttagcacctgggcactaccgatctttatcaataattacggtatcagtaacacgatgctaatgggggcgggtatcagcctgtttggcttgttgatttccgtagcgtttgccccggagactcgagggatgagtctggcgcagaccagcaatatgacgatccgcgggcagagaatggggtaaattgttcagatttctctcttttctgaatcaatattattgactataagccgcgtgaatatatgactacactttgtgggaaaacaaaggcgtaatcacgcgggctacctatgattcttataatttatgcgcatccgtatccgcatcattcccatgcgaataaacggatgcttgaacaggcaaggacgctggaaggcgtcgaaattcgctctctttatcaactctatcctgacttcaatatcgatattgccgccgagcaggaggcgctgtctcgcgccgatctgatcgtctggcagcatccgatgcagtggtacagcattcctccgctcctcaaactttggatcgataaagttttctcccacggctgggcttacggtcatggcggcacggcgctgcatggcaaacatttgctgtgggcggtgacgaccggcggcggggaaagccattttgaaattggtgcgcatccgggctttgatgtgctgagccagccgctacaggcgacggcaatctactgcgggctgaactggctgccaccgtttgccatgcactgcacctttatttgtgacgacgaaaccctcgaagggcaggcgcgtcactataagcaacgtctgctggaatggcaggaggcccatcatggataattaaggaatggcaggaggcccatcatggatagccatacgctgattcaggcgctgatttatctcggtagcgcagcgctgattgtacccattgcggtacgtcttggtctgggaagcgtacttggctacctgatcgccggctgcattattggcccgtgggggctgcgactggtgaccgatgccgaatctattctgcactttgccgagattggggtggtgctgatgctgtttattatcggcctcgaactcgatccacaaaggctgtggaagctgcgtgcggcagtgttcggctgtggcgcattgcagatggtgatttgcggcggcctgctggggctgttctgcatgttacttgggctgcgctggcaggtcgcggaattgatcggcatgacgctggcgctctcctctacggcgattgccatgcaggcgatgaatgaacgcaatctgatggtgacgcaaatgggtcgcagtgcctttgcggtgctgctgttccaggatatcgcggcgatcccgctggtggcgatgattccgctactggcaacgagcagtgccagcacgacgatgggcgcatttgctctcagcgcgttaaaagtggcgggtgcgctggtgctggtggtattgctggggcgctatgtcacgcgtccggcgctgcgttttgtagcccgctctggcttgcgggaagtgtttagtgccgtggcgttattcctcgtgtttggctttggtttgctgctggaagaggtcggcttgagcatggcgatgggcgcgtttctggcgggcgtactgctggcaagcagcgaataccgtcatgcgctggagagcgatatcgaaccatttaaaggtttgctgttggggctgtttttcatcggtgttggcatgagcatagactttggcacgctgcttgaaaacccattgcgcattgtcattttgctgctcggtttcctcatcatcaaaatcgccatgctgtggctgattgcccgaccgttgcaagtgccaaataaacagcgtcgttggtttgcggtgttgttagggcagggcagtgagtttgcctttgtggtatttggcgcggcgcagatggcgaatgtgctggagccggagtgggcgaaaagcctgaccctggcggtggcgctgagcatggcagcaacgccgattctgctggtgatcctcaatcgccttgagcaatcttctactgaggaagcgcgtgaagccgatgagatcgacgaagaacagccgcgcgtgattatcgccggattcggtcgttttgggcagattaccggacgtttactgctctccagcggggtgaaaatggtggtactcgatcacgatccggaccatatcgaaaccttgcgtaaatttggtatgaaagtgttttatggcgatgccacgcggatggatttactggaatctgccggagcggcgaaagcggaagtgctgattaacgccatcgacgatccgcaaaccaacctgcaactgacagagatggtgaaagaacatttcccgcatttgcagattattgcccgcgcccgcgatgtcgaccactacattcgtttgcgtcaggcaggcgttgaaaagccggagcgtgaaaccttcgaaggtgcgctgaaaaccgggcgtctggcactggaaagtttaggtctggggccgtatgaagcgcgagaacgtgccgatgtgttccgccgctttaatattcagatggtggaagagatggcaatggttgagaacgacaccaaagcccgcgcggcggtctataaacgcaccagcgcgatgttaagtgagatcattaccgaggaccgcgaacatctgagtttaattcaacgacatggctggcagggaaccgaagaaggtaaacataccggcaacatggcggatgaaccggaaacgaaacccagttcctaataaagagtgacgtaaatcacactttacagctaactgtttgtttttgtttcattgtaatgcggcgagtccagggagagagcgtggactcgccagcagaatataaaattttcctcaacatcatcctcgcaccagtcgacgacggtttacgctttacgtatagtggcgacaattttttttatcgggaaatctcaatgatcagtctgattgcggcgttagcggtagatcgcgttatcggcatggaaaacgccatgccgtggaacctgcctgccgatctcgcctggtttaaacgcaacaccttaaataaacccgtgattatgggccgccatacctgggaaagtatcggtcgtccgttgccaggacgcaaaaatattatcctcagcagtcaaccgggtacggacgatcgcgtaacgtgggtgaagagcgtggatgaagccatcgcggcgtgtggtgacgtaccagaaatcatggtgattggcggcggtcgcgtttatgaacagttcttgccaaaagcgcaaaaactgtatctgacgcatatcgacgcagaagtggaaggcgacacccatttcccggattacgagccggatgactgggaaagcgtattcagcgaattccacgatgctgatgcgcagaactctcacagctattgctttgagattctggagcggcggtaattttgtatagaatttacggctagcgccggatgcgacgccggtcgcgtcttatccggccttcctatatcaggctgtgtttaagacgccgccgcttcgcccaaatccttatgccggttgctcggctggacaaaatactgtttatcttcccagcgcaggcaggttaatgtaccaccccagcagcagccggtatccagcgcgtatataccttccggcgtacctttgccctccaggcttgcccagtgaccaaaggcgatgctgtattcttcagcgacagggccaggaatcgcaaaccacggtttcagtggggcaggggcctcttccgggctttctttgctgtacatatccagttgaccgttcgggaagcaaaaacgcatacgggtaaaagcgttggtgataaaacgcagtcttcccagcccccgcaattccggactccagttatttggcatatcgccgtacatggcatcaagaaagaagggataggagtcactgcttagcaccgcttctacatcgcgtgcgcactctttggcggtctgcagatcccactgcggcgtgatccctgcgtgggccatcaccagctttttctcttcgtcgatttgcagcagaggctggcgccgcagccagttaagcagctcgtcggcatccggcgcttccagcagcggtgtcaggcgatctttcggtttattgcggctgatcccggcaaataccgccagcagatgcagatcgtgattgcccagcaccagacgtacgctgtcgcctaaggatttcacatagcgcagaacatccaggctacccggcccgcgcgcgaccagatcgcccgtcagccagagggtatctttcccaggggtaaattctactttatgcagcaatgcgatcagttcatcgtaacaaccatgaacgtcgccaataaggtatgtcgccatattcttttaatgaatgagtgtgggaacggcgagtcggaatacgggaatgtcgatgctgaaagggacgccattttcatcgatcatttcgtagtgaccctgcatggtgcccagcggggtttcaatgattgcaccgctggtgtactggtactcttcgccaggcgcgataagtggctggacgccaaccactccttcgccctggacttcggtttcacggccattgccattggtgatcagccagtaacgccccaacaactgcactggcgctcgccccagattgcgtatggttacggtataagcaaaaacgtaacgttcattatcaggactagattgagcctcaatgtagacgctttgaacctgaatacacactcgggggctattgatcatcgttaactctcctgcaaaggcgcgttctccgccagatagttcgccatctggcaatattgcgcgacagagatattttccgctcgcatcgccgggtcgatccccattcccgttaacacctcgacgctaaacaggttgccgaggctgttacgaatggttttacgacgctggttaaaggcttcggtggtgatgcggctcaacacacgaacatctttaaccgggtgaggcatcgttgcatgaggaaccaggcgcacgacggcggaatccactttgggtggtggtgtaaaggcactcggcggtacttccagtaccgggatcacattgcaatagtattgcgccatgacgcttaatcgaccatacgctttgctgttcggtcctgcaaccagacgattcaccacctctttttgcaacataaagtgcatgtcggcaatggcatcagtatagctaaacagatggaacatcaacggcgtggagatgttataaggcaggttgccgaaaacacgcagcggctgacccattttctcggccagttcaccaaagttaaaggtcatcgcatcctgctgataaatcgtcagtttcgggcctaagaatggatgcgtttgcagacgtgccgccagatcgcggtcaagttcgatgaccgtcagctggtccagacgttcgccgaccggttcggtcaatgccgccagaccggggccgatttcgaccatcgcctggcccttttgcgggttaatggcagacacaatactgtcgatcacgaactgatcgttgagaaagttttgcccgaagcgtttacgggctaagtggccctggtggactcgattattcattgggtgttaacaatcattttgatggcgagattaagcgccgtaataaaactgccgacatcggctttgccacgtcccgccagttcaagcgcggtgccgtggtccacacttgtgcgaataaagggcaggcccagcgtaatgttcacaccgcgcccgaagccctggtattttagcacgggaagaccctgatcgtggtacatcgccagcacggcgtcggcgttatcaagatatttcggctgaaacagggtatcggcaggcagcggcccgttgagtttcatcccctgcgcccgcagctcattgagcaccggaataatggtgtctatctcttccgtacccatatgaccgccttcgcccgcgtgcggattcagcccgcagaccagaatgcgcggttcggcaataccaaatttggtccgcaaatcgtgatgcaaaatagcaatcacttcgtgcaaaagtgcaggggtgatagcgtctgcgatatcgcgcagcggtaaatgcgtcgttgccagcgccacgcgaagttcttcggtcgccagcatcatcaccacctttttcgcctggctacgctcttcgaaaaactcggtatgaccggtaaaaggaatgccagcgtcgttaataacgcctttatgcaccggacctgtgatcagcgcggcaaattcgccgttcagacaaccatcgcacgctcgcgccagcgtttccaccacataatgcccattttcaaccgctaactgccccgcagtgacaggtgcacgtagcgcgacaggaagtagcgttaatgtgcccgcagtttgcggttgtgcaggggagttgggggaataagggcggagggtgagcggcaaaccgagcatcgctgcccggttggtaaggagagtggcatcggcacaaacaaccagttcgaccggccactcacgctgtgcaagctggacaactaagtccgggccaatcccggcgggctcgccgggagtgatcacaacacgttgggttttaaccattagttgctcaggattttaacgtaggcgctggcacgttgttcctgcatccagcttgctgcttcttcgctgaacttacggttcatcagcatgcggtatgcacgatctttctgcgcagcgtcggttttatcgacattacgggtatccagcagttcgattaaatgccagccgaaactagagtgaaccggtgcactcatttgacctttgttcaggcgagtcagggcgtcacggaaggccggatcgaaaatatctggtgtagcccagccgagatcgccgccctggttagcagagcctggatcctgagagaactctttcgctgcggcagcaaaagtcgttttaccactcttgatatcagcagcaatctgttccagtttcacacgggcctgttcgtcagtcatgatcgggctcggtttcagcagaatatggcgagcatgaacttcggtcacgctgatatttttgctttcgccgcgcaggtcgttaactttcagaatatggaagccaacgccggaacgaatcgggccaacaatgtcgcctttcttcgcggtgcttaatgcctgggcgaagatcccgggcaactcctgaatacggccccagcccatctggccgccgttcagcgcctgctggtcggcagaatgagcaatcgccagcttaccgaaatcagcgccgttacgcgcctgatcgacaatggcgcgcgcctggctttccgcttcgttcacctgatcagaggtcgggttttccggcagcgggatcaggatgtggctcaggttcagctcagtgctggcgtcgttttggttacccacctgctgcgccagggattcgacttcctgcggcaggatggtgatgcgacgacgcacctcgttgttacgcacttcagagataatcatctctttgcggatctggttacgataggtgttgtagttcagtccatcgtaagccagacggctgcgcatctgatccagcgtcatgttgttctgtttcgcgatgttagcaatcgcctgatccagctgctcatcggagattttcactcccattttctgccccatctgcaggatgatttgatccatgatcaaacgttccatgatttggtggcgcagcgtcgcgtcatcaggaagttgctgccttgcctgagcagcgttcagttttacgctctgcattaatccatcaacgtcgctttccagcacgacgccgttattgacgacggctgcgactttatcgactacctggggggcagcgaaactggtattcgcgatcatggcgataccgagaagcagcgttttccagttcttcatactttttccatttcaattaaccgcactgcggattacgtggtaaatcaacaaatcacaaagtgttttgatacggcagaatgttgctacgcagcatctcttgcgtacccagaccgtagttggagctcaggccgcgaagttcgatgttaaagccgattgcgttgtcatataccgcatgttgtttatcgttatcccaaccgttcagcttccgctcgtaaccgacgcgaattgcatagcagcaggagctgtattgcacacctaacatagagtcggcttgcttgttagcattggtgtcgtagtagtaggccccaacaatggaccaacgatcggcaattggccagctggcgacagcacctacctggctaataccattcttatattgctcagcagtggaatagtacttaggcagcgtagcctgaatatattccgggctggcgtaacggtaattcagctgtaccagacggtcttcatcccgacggtattcaatgctggagttactggtcgctacgttatccagacgtgtatcgtactgaatcccgccacgcaatccccaacgctcggagatacgccagtaagtatcgcctgcccacaccagactacccgttttgtcgtcattctcccatgttatgttgtcatcgccagtgcgagactccgtgaaatagtagatttgaccaacggaaatattaaaacgttcaacggcagcatcatcatatatgcgagatgtgacaccggtcgtcacctggttagcggaggcaatacggtcaagaccgccgtaagtccggtcccggaacaggccagagtagtcagattgcagcagagagctgtcgtagttatagatgtcgctctgatcgcgatacggcacgtacaaatactgcgcgcgcggttccagcgtttgggtataacccggagccagcatttccatatcgcgttcaaagaccattttgccgtcaactttgaattgcggcattacgcggttaacggattcgtccagcttggtcgtgtttctggagttataccagtcaagattggtttgctgataatgggttgccagcaacttcgcttcggtattgatgctgccccagttattagagagcggcaaattgatggtcggttccaggtgaacacgggttgcttcaggcatgtcgtctctggtgttaacaaagtgcactgcctggccgtaaatacgcgtatcaaacggaccaacatcattctggtagtaattaacgtctaactgcggctctgcgctgtagctactggtgttctgttcgctgaaaacctggaactgcttggtactaacggtggcattgaagttttgcaccgcatagccaacgctgaatttttgcgttgcgtagccgtcagtactggaaccgtacttgttatcgaaatcattgaagtagctaggatcgctgaccttggtgtagtcgacgttgaaacgccacacctgatccatgaccccggagtggttccagtagaataaccaacgacgactactgtcatcgttcgggtgttcatcttcatagactttatcactaggcagatagtccagttccatcaagccagcgcccgcctgggagaggtagcggaattcgttctcccacatgatgttgccacgacgatgcatataatgcggcgtgatggtggcatccatatttggcgcgatgttccagtaatatggcaggtagaactcaaagtagttggtggtggtgtacttggcgttcgggatcaagaaaccagagcgacgtttgtcacccaccggcaactgcaaataggggctataaaagatcggtaccggacccaccttaaagcgggcgttccagatctccgcaacttgttcttcgcggtcatgaataatttcgctacctaccacgctccaggtgtcagaacccggcagacaggaggtaaagctaccgttatccagaatggtatagcggttttcgccacgttgtttcatcaggtccgctttaccgcgaccctggcgacccaccatctggtaatcaccttcccagacgttggtatctttggtgttcagattcgcccagcctttcggccctttgaggatcacctggttatcgtcgtaatggacattaccgagcgcatcaacggtacgtaccggctccggttgtcctggtgcctctttttgatggagctgcacttcgtcggcctgcagacggctgttaccctgcatgatatccacgctgccagtaaacacggcgtcatccgggtagtcccctttcgcgtggtcagcattgatagtcacgggtaagtcattggtatcgccctgtaccagaggacggtcatagcttggcacgcccaacatgcactgactggcgaggtcggctgccagtccctgttgactataaagggcggtggcaatcatggtggccaggagagtggggatacgttttttcatacgttgattttattgttccatcatcggtaacgttgcgcgtgacaaacggtcagagactaacgtactcgtcatctctacgctagtgttaatcctgtccgaatagcgtcagtggtgttaggcacggcattgaatgacaggtatgataatgcaaattataggcgatgtcccacaattgaccgcagccggaaaacggtaaaagcacctttatattgtgggagatagccctgatatccgtgtgtcgatttggggaatatatgcagtattggggaaaaatcattggcgtggccgtggccttactgatgggcggcggcttttggggcgtagtgttaggcctgttaattggccatatgtttgataaagcccgtagccgtaaaatggcgtggttcgccaaccagcgtgagcgtcaggcgctgttttttgccaccacttttgaagtgatggggcatttaaccaaatccaaaggtcgcgtcacggaggctgatattcatatcgccagccagttgatggaccgaatgaatcttcatggcgcttcccgtactgcggcgcaaaatgcgttccgggtgggaaaaagtgacaattacccgctgcgcgaaaagatgcgccagtttcgcagtgtctgctttggtcgttttgacttaattcgtatgtttctggagatccagattcaggcggcgtttgctgatggtagtctgcacccgaatgaacgggcggtgctgtatgtcattgcagaagaattagggatctcccgcgctcagtttgaccagtttttgcgcatgatgcagggcggtgcacagtttggcggcggttatcagcagcaaactggcggtggtaactggcagcaagcgcagcgtggcccaacgctggaagatgcctgtaatgtgctgggcgtgaagccgacggatgatgcgaccaccatcaaacgtgcctaccgtaagctgatgagtgaacaccatcccgataagctggtggcgaaaggtttgccgcctgagatgatggagatggcgaagcagaaagcgcaggaaattcagcaggcatatgagctgataaagcagcagaaagggtttaaatgaccctgtaaatgatgctgagtaactgcccacgattaaaggtggccgccctggcggtcacttctttgagaaaaggcgtttactcagaatggtggacaggctcaatgcacggtttacgggaggggttctgtaggttttatcgcgttgaccctgcttaaggttgagagctttacgacgagcggaattatatttttacgtcttaaaaataaaaaacacatacctgaatgagcgatttttgaaagtatatttattcagaacgcgcatcatgagtttttaactcaatgcgaggctattaccatgaaagtaagtgttccaggcatgccggttacacttttaaatatgagcaagaacgatatttataagatggtgagcggggacaagatggacgtgaagatgaatatctttcaacgcttgtgggagacgttacgccatctgttctggagtgataaacagactgaggcttataaacttctgttcaatttcgtgaataaccagactggcaacatcaacgccagtgaatactttactggggctatcaacgagaatgagagagaaaagtttatcaatagcctggaattattcaataaacttaaaacatgcgcaaaaaatccggatgagttggtcgcaaagggcaatatgcgctgggtcgcccagaccttcggggatatcgagttaagtgtcacttttttcattgaaaagaataagatatgtactcagacgttgcagctgcataagggccaaggtaacttgggcgttgatcttagaaaggcttaccttcccggcgttgacatgagggattgttaccttggtaaaaaaacaatgaaaggtagcaatgatatcctttatgagagacctgggtggaatgctaacctgggcgtgctaccccggacggtgctaccccggacggtgctaacccggacggtgctaacctggacggtgctaccgtgaacggtgctacctccttatatgatgaggtaattattattaataaaatcccccccaaaaaaattgatactaaaggagttgctactgaagaagttgctactaaaaaagtactgctgaacaaattactgacaacgcaattattgaatgagccagaataagctaaggttgaaggggctggaacgccccttcaaccttagcagtagcgtgggatgatttcacaattagaaagacctgcatgatgagctagagaagaggctagtgacgcaaggcgtcgtgcaggacacggatcaccgagatgggcatcgccaaccagactgctaattagcccatgaataacaatcagaaaggaccataacagacccgttaaaatgaaatataagagacggtcaacgggtgaagaaaaagttcaaaaattcgctgtggagcaggaagggaattaccgaatggaaagcgtagccacacgcaacaactgaaagcagtttggcagaaacaaaaaatccccggactcggggatttatgtacaagaggcagcccttaggatgagggtataaacgtacaggaaaggttaaaaatccgctggcgctttaaacgtcatactattgccatacgccggatgggtaatcgtcaacatctctgcatgtagcaacaaacgtggtgccatcgctctcgcttctggacttgcataaaaacgatcgccgagaatcggatgacccagcgccagcatatgcacacgcaattgatggctacgcccggtaatcggttttaacaccactcttgccgtgttatccgccgcatactccaccacttcatattccgtctgcgcaggtttacccgtttcgtaacagactttctgtttcgggcggtttggccagtcgcaaatcagcggcagatccaccagaccttctgcgggggatggatgcccccagacgcgggccacatactgctttttcggctcgcgctcgcggaactggcgttttaactcccgctccgcggctttggtcagcgccactacaatcacgccgctggtagccatatccagacgatgcacgctttctgcctgcggataatcacgctgaatgcgcgtcatcacgctgtctttgtgctcttccagacgacccggcacactcaacaaaccgctcggcttgttgaccaccataatatggtcatcctgatacaggataaccaaccagggttcctgcggtggattgtagttttccatccccattttcggctccgttactgatgcgttacaacgatcaaacgcagggcatccagacgccaacctgcctgatccaggctttccattacctgctgacggttgctctcaatggcggtcagttcgtcgtcacgaatgttcgggttcactgcacgcagagcttccagacgagacagctcggcagacagtttttcgtcggcttcgttacgcgctgcatcaatcaatgcacgggcagatttctcgatctgcgcttcacccagttgaaggatagcgtgaacatcctgctgcacggcgttaaccagtttgctgccggtgtgacggttaaccgcgttaagctggcggttaaaggtttcaaactctacctgcgccgccaggttgttgccgtttttatccagcagcatacgtaccggcgtcggtggcaggaagcggttgagctgcaactgcttcggagcctgggcttcaaccacataaatcagttccaccaacagcgtacctaccggcaacgctttgttttttaacagactaatcgtgctgctaccggtatcgccagaaaggatcagatccagaccgttgcggatcagcggatgctcccaggtaataaactgtgcatcttcacgcgccagcgccacttcacgatcaaaggtgatggtgatgccatcttcgctcaggccagggaagtccggcaccagcatatgatcggacggcgtcagcacgatcatgttgtcgccgcgatcgtcctgattgataccgataatatcgaacaggttcatggcgaaggcgatcaggttggtatcgtcatcctgctcttcaatgctttctgccagtgcctgggctttttcgccaccgttggagtggatttccagcaggcggtcacgaccctgttccagctgtgctttcagcgcttcatgttgctcgcggcagtttttgatcagatcgtcaaagccttcggtttgatccggactagccagatagttaatcagatcgttgtatacgctatcgtaaatagtgcgtccggtcgggcaggtgtgctcaaatgcatccagaccttcgtgataccagcgcaccagcacgctctgagcggttttctccagataaggcacatggatctgaatatcgtgcgcctggccgatacgatccagacgaccaatacgctgctccagtagatccgggttgaatggcaggtcaaacatcaccatgtggctggcgaactggaagttacgtccttcagaaccgatttcactgcacagcagtacctgtgcgccggtgtcttcttcggcaaaccaggcggcagcgcggtcacgttcgataatgctcataccttcgtggaacaccgcagcgcgaataccttcacgttcgcgcagtacctgctccagttgcagcgcagtggcagctttggcgcagatcaccagcactttctgagagcgatggctggtcaggtagcccatcagccactcaacgcgcggatcgaagttccaccaggtggcgttatcaccttcaaattcctgataaatacgctccgggtagagcatatcgcgagcacgatcttccgcacttttacgtgcgcccataatgccggagactttaatagccgtctgatactgcgtcggtagcggcagcttaatggtgtgcagctcgcgtttcgggaatcctttcacaccgttacgcgtgttacggaacagcacgcggctggtgccgtggcgatccatcagcatgctaaccagctcctgacgggcgctctgggcatcttcgctgtcgctgtttgctgcctgcaacagcggctcgatatcctgctcgccgatcatctcgccgagcatgttcagttcgtcattgctcagtttgttacctgccagcagcatggcaacggcgtccgcaaccggacgataatttttctgctcttcaacgaactgcgcaaaatcgtggaaacggttcgggtccagcagacgcagacgggcgaagtggctttccatccccagctgttccggggtcgcggtcagcagcagaacgcccggcacgtgctctgccagttgttcaatggcctgatattcacggcttggcgcatcttcgctccacaccaggtgatgcgcttcatcgaccaccagcaggtcccattcggcttcacagagatgttccaggcgctgtttgctacgacgggcaaaatccaggctgcaaatcaccagctgttcggtgtcaaacgggttgtaagcatcgtgctgagcttcggcataacgctcatcatcaaatagcgcaaagcgcaggttgaaacggcgcagcatttctaccagccactgatgctgtaaggtttccgggacgataattagcacacgttcagcagcgccagagagcagttgctgatgcaggatcatcccggcttcaatggttttccctaaacccacttcgtcagccagcaggacgcgcggcgcgtggcggcgaccaacatcatgagcgatgttgagctgatgcgggatcaggctggtacgctgaccgcgcaggccgctgtacggcatacggaactgttcgctggaatatttacgcgcgcgataacgcagcgcaaagcggtccatacggtcaatctgcccggcaaacagacggtcctgcggtttgctgaacaccagtttgctatcaaggaaaacttcacgcagggctacgccggactcttcagtatccaggcgagtaccgatataggtcagcaagccattttcttcttttacttcttcgacttgcatctgccagccgtcatggctggtaatggtatcaccagggttgaacatcacgcgggtcacgggggaatcactgcgtgcgtacagacggttttcaccagtagatgggaaaagtaaagtgacagttcgcgcatccaccgcgacaacggttccaagtcccaattcgctttctgtatcgctgatccagcgttgaccaagtgtaaaaggcatatgtgttcggctctatatctttaattgcaggcaataaccacccgctaccgtgcttatgaggtagtggtgttattcaggtccaggaatggaaagggcgctatggtactggatggcaaagcattcgtcacgcatcaaaatggtatctggcgaactcttttttttgctcaaaatagcccaagttgcccggtcataagtgtagcaaaattatcctcaataaaagggagtattccctccgccacgggttgtagctggcgggtcagatagtgttcgtaatccagtggactacgttggtagtccagcggctccgggccgttggtggtccatacgtacttaatggtgccgcgattctgatattgcaaggggcgaccacgcttttggttttcttcatcggcaaggcgagcggcgcgtacatgaggcggcacattacgctgatactcgctcagcggacggcgaaggcgtttacggtaaaccagtcgcgcatccagttcacccgccatcagtttgtcgatggtttcgcgtacatattcctgatatggctcgttgcggaagatgcgcaggtatagctcctgctgaaactgctgggccagcggcgtccagtcggtgcgcacggtttccagccctttaaacaccatccgctgcttgtcgccctcctgaatcagtccggcataacgctttttactgccggtatcggctccgcgaatggttggcatcagaaaacggcagaaatgggtttcatactccagttctaatgcgctggtcagccgttgtttttgcagcgtttccgcccaccaggcgttaacgtgctgcaccagtgcacgaccgattttcgccgcttcttcttcgctatgtgcgcctttcagccagacaaacgtactgtcggtatcgccgtagataacgtcgtagccctgtgcttcaatcaacgctttggtttgccgcatgatctgatgaccacgcatggtgatgctgcttgccagccgcggatcgaagaagcggcaggcggtggtgccgagcacgccataaaaggcattcatgatgattttcagcgcctggctcagcggtttgttaccctggcgtttggcttcatcgcgcccgtgccagatgttagtcacaatctccggcaggcaatgtttttctcggctgaaccaggcatcgagaaaaccttcggtactgtgctctggatcaggctgcgccatgccttccaccagcccgacgggatcaatcagaaaggtgcggatgatgctcgggtacaggcttttatagtccagcaccagcacactatcataaagccctggccgactatccatcacgtagccgccagggctggcgtgcggcggcacttcgccgagattaggcgcgacataaccagcgcgatgcattcgcggaaaatagagatgaccaaatgccgccacgctaccgccgtgtcggtccaccggcaggccgttcaccgttgcccgttcgagtaaaaatggcatgatttcagttttgtggaagatctgcgtcaccagctcgcaatctttcaggttataagttgccagcgcaggtttatcttcggcgaaacggcggtcaatttcgtccattcgatcccacgggttatcgatagattttccttcgcctaatagctcctgagcgacagtttccaggctgaaactagagaaattccagaacgcggatttcagcgcctcgataccgtcgataattagccgacctttagcctgggcaaaaaagacgccgtttttaaagccgtgctcgcgccactccagctcgctattatcgcgcccaagacgcagcggaagacggtaacgctcggcatgtttttgcagcattcgcagatcgaactgcaccacgttccaaccgatgatcacatcaggatcgtagttggcaaaccaggcgttgagtttttccagcaactgcgggcggctggcgacgtattccagttcgaaatcaaggctggaggcgtcgccattctccggccccagcatataaacgatgcgctgcccgcagccttccaggccgatgcagtacagctcaccgtggcgggtggtttcaatatctatagaaacccacttgagcggcggacgatagtcgggatgcggtttcagacgggcattaacgatagtgccattgtgcatatcaccctcgacccacaccggactggtgataaaccgctccatcagatagcgttctggcggacgcacatcggcctcgtagacggtaacgccaccttcacgcaggcgcttttcgtaattcatcaattggcgatgggcgcgacagtaaaggccatacaccggctggcggtgaaaatcctttaacgccagcggtgtcaggcgaaagccttgttcaccctgcaaaatatgctgagcgcggggaacctgatcggcgggaataaacgccacggactcttgcggtgcaagcgtaacctgcaacggcccgttgtccgtcgccagccagaaggagacttctgtcccttgcggggtgtcccgccagtgtcgggttaagataaaacctgcctgcgccacgctgaaaatccatcaaaaaaccaggcttgagtatagcctggtttcgtttgattggctgtggttttatacagtcattactgcccgtaatatgccttcgcgccatgcttacgcagatagtgtttatccagcagcgtttgctgcatatccggtaactgcggcgctaactgacggcagaatatccccatataagcgacctcttccagcacgatggcgttatgcaccgcatcttcggcatttttgccccatgcaaacgggccgtgggaatggaccagaacgccgggcatttgcgctgcatcgataccctgtttttcaaaggtttctacgatgacgttaccggtttcccactcatattcgccgttgatttctgcgtcggtcattttgcgggtgcagggaatggtgccgtagaaatagtcggcgtgggtggtgccggttgctggaatgctctgacccgcctgcgcccagatggtggcgtggcggctgtgcgtatgcacaatgccgccaatggaggggaatgcctgatagagcagccggtgagttggcgtgtcggaggagggctttttcgtaccttcaaccacttcaccggtttcgatgctaaccacgaccatatcgtcagcggtcatgacgctgtaatcgacgccggaaggtttgatcacaaagacgccgcgctcgcgatcaacggcgctgacgttgccccatgtgagcgtgaccaggttgtgttttggcagcgccaggttggcttctaatacctggcgtttgagatcttctaacatgttgactccttcgtgccggatgcgctttgcttatccggcctacaaaatcgcagcgtgtaggcctgataagacgcgccagcgtcgcatcaggcgttgaatgccggatgcgctttgcttatccggcctacaaaatcgcagcgcgtaggcctgataagacgcgccagcgtcgcatcaggcgttgaatgccggatgcgctttgcttatccggcctacaaaatcgcagcgtgtaggccagataagacgcgtcagcgtcgcatcaggcgttacataccggatgcggctacttagcgacgaaacccgtaatacacttcgttccagcgcagcgcgtctttaaacgctggcaggcgtgtgtcgttatcaatcaccgtgatttcaatgtcgtgcatctcggcgaattggcgcatatcgttgaggttcagtgcatggctgaagacggtatggtgcgcgccaccagcgaggatccacgcttcggaagcagttggcagatccggttgcgctttccacagcgcattcgccaccggcagtttcggcagggagtgcggtgttttcaccgtgtcgatgcagttaaccagtagacggtaacgatcgccgagatcaatcaagctggcgacaatcgctgggccggtttgggtattgaagatcaggcgggcaggatcgtccttaccaccaataccgagatgctgaacgtcgaggatcggtttctcttctgcggcgatgctcgggcagacttccagcatatgggagccgagcaccaggtcattacctttctcgaagtgataggtgtagtcctccataaaggaggtgccgccctgcagaccggtactcatcaccttcatgatgcgaagcagggcggcagttttccagtcgccttcgcccgcaaagccgtaaccctgctgcatcagacgctgtacggccagaccaggaagctgtttcagaccgtgcaaatcttcaaaggtggtggtgaacgcgtggaagccaccttgttccaggaaacgcttcatccccagctcaatacgcgccgcttccagcacgttctgtcgttttttgccgtggatttgtgtggcaggcgtcatggtgtagcagctttcgtactcatcgaccagcgcgttaacatcgccgtcgctgatggagttcaccacctgcaccagatcgccaaccgcccaggtattgacggagaaaccgaacttgatctgtgcggcaactttatcgccatcggtgaccgccacttcacgcatgttatcgccaaatcggcagactttcagatgacgggtatcctgtttagagaccgcctgacgcatccaggagccgatacgctcatgggcttgtttatcctgccagtgaccggtaaccacggcatgttgctgacgcatacgcgcgccaatgaagccgaactcgcgaccgccatgtgcagtctggttcaggttcataaagtccatatcgatactgtcccacggcagcgccgcgttgaactgggtgtggaattgcagcaacggtttgttgagcatggtcaggccgttgatccacattttggccggggagaaggtgtgcagccacaccaccagaccagcgcaacgatcgtcgtaattcgcgtcgcggcaaatagcggtgatttcatccggcgtggtgcccagcggtttcaacaccagtttgcagggcagtttcgcttccgtattcagcgcattaacgacgtgctcggcatgttgggtgacctgacgcagggtttccgggccatacagatgctggctgccaatgacaaaccacacttcataattatcaaaaatcgtcattatcgtgtccttatagagtcgcaacggcctgggcagcctgtgccggggcggaagttggaagatagtgttgttcggcgctcatcgcccattgctgatagcggcgataaagctgttcaaagcgttgtgcctgctcgctgcacggttgcagggttttctctaccgcactggccattttttgctgagcacttgggatgtctgcgtgcactttcgcggcgacggcagcaaaaatcgccgcaccgagcgcacagcactggtcagaggcaacaatttgcagcgggcgattcagcacgtcgcagcaggcctgcataatgacctggtttttccgcgcgatgccgcccagtgccatcacgttattaacggcgatcccctgatcggtaaagcactccatgattgcgcgtgcgccaaaggcggtggcagcaatcaaaccgccgaacagcagcggagcgtcggtagcgaggttaagatcggtaatcacccctttcaggcgttggttagcgttcggtgtgcggcggccgttaaaccagtcgagcaccaccggcaggtgatccagagacggatttttggcccatgcttcggtcagcgccggaagcagttgtttctggctggcgttgatttgcgttttcagttccggatgctgggcggcaagctgttccagcggccagccgagtacgcgaccaaaccaggcgtagatatcaccaaacgcgctttggcctgcttccagaccgataaatccaggcaccacgctgccatcaacctgaccgcaaatacctttaactgcccgctcgccaacgctctgtttgtcggcaatcagaatgtcgcaggtggaagtaccgataacttttaccagtgcgttaggctgtgcgcctgcgccaactgcgcccatatggcagtcaaacgcgccgccggaaatcaccacgctttcaggcaggccgagacgctgcgcccattccgggcataaggtgcccaccggaatatcggcagtccaagtgtcagtgaacagcggggaaggcaaatggcgattgaggatcgggtccagctcatcaaagaaactggctggcggcaggccgccccagctttcgtgccacagagatttatgcccggcgctgcaacgtccgcgacgaatatcctgcgggcgggtggtaccggaaagcagagctggcacccagtcgcacagctcaatccagcttgcggcagattgcgccacggcgctgtcctggcgagtcacatgcaggatttttgcccagaaccattcgctggaataaataccaccaatgtagcgggagtagtcaacgttgcccggcgcgtggcacaaacgggtaatctcttccgcttcttcaaccgcagtgtggtctttccacaatacgaacatcgcgttcgggttttcggcaaactccgggcgcagcgccagcacgtttccgtcggcatcaatcggtgcgggcgtgctgccggtactgtcaacgccaatcccgaccacagctgcgcgctgttcgacgctaagctctgcaagcacggttttcagtgccgcttccatactctcaatgtagtcacgcggatgatgacggaactggttattcggggcatcacaaaattgccctttctgccaacggggataccactctacgctggtggcgatctcttcaccggtagcgcagtccaccgccaaagctcgcacagaatcactgccaaaatcgaggccaattgcaatcgccatcgtttcactccatccaaaaaaacgggtatggagaaacagtagagagttgcgataaaaagcgtcaggtaggatccgctaatcttatggataaaaatgctatggcatagcaaagtgtgacgccgtgcaaataatcaatgtggacttttctgccgtgattatagacacttttgttacgcgtttttgtcatggctttggtcccgctttgttacagaatgcttttaataagcggggttaccggttgggttagcgagaagagccagtaaaagacgcagtgacggcaatgtctgatgcaatatggacaattggtttcttctctgaatggtgggagtatgaaaagtatggctgaagcgcaaaatgatcccctgctgccgggatacagctttaacgcccatctggtggcgggtttaacgccgattgaggccaacggttatctcgatttttttatcgaccgaccgctgggaatgaaaggttatattctcaatctcaccattcgcggtcagggggtggtgaaaaatcagggacgagaatttgtctgccgaccgggtgatattttgctgttcccgccaggagagattcatcactacggtcgtcatccggaggctcgcgaatggtatcaccagtgggtttactttcgtccgcgcgcctactggcatgaatggcttaactggccgagtatatttgccaatacgggtttctttcgcccggatgaagcgcaccagccgcatttcagcgacctgtttgggcaaatcattaacgccgggcaaggggaagggcgctatagcgagctgctggcgataaatctgcttgagcaattgttactgcggcgcatggaagcgattaacgagagcctccatccaccgatggataatcgggtacgcgaggcttgtcagtacatcagcgatcacctggcagacagcaattttgatatcgccagcgtcgcacagcatgtttgcttgagcccgagccgtctgagtcatcttttccgccagcagttagggattagcgtcttaagctggcgcgaggaccaacgcattagtcaggcgaagctgcttttgagcactacccggatgcctatcgccaccgtcggtcgcaatgttggttttgacgatcaactctatttcagccgagtatttaaaaaatgcaccggggccagcccgagcgagtttcgtgccggttgtgaagaaaaagtgaatgatgtagccgtcaagttgagttaattggtaacgaatcagacaattgacggcttgacggagtagcatagggtttgcagaatccctgcttcgtccatttgacaggcacattatgcaagcattgctggaacactttattacccaatccaccgtgtatagtttgatggcggtggtgttggtggcctttctggagagcctggcgctggtcggtttgattctacccggtacggtgctgatggcggggctgggagcgctgattggcagcggcgagttaagtttctggcacgcctggctggcagggattattggctgcttgatgggcgactggatttctttctggctgggttggcgttttaaaaagccgttgcatcgctggagttttctgaagaaaaacaaagcactacttgataaaactgaacatgcgttgcatcaacacagcatgttcaccattctggtcggtcgttttgttggcccgacgcgtccgctggtgccaatggtggcgggaatgctggatctgccggtggctaaatttattacgccgaatattatcggctgcctgctgtggccgccgttttacttcctgccagggattctggcgggcgcggcgatcgatattcctgccggaatgcagagcggtgagtttaaatggttgctgctggcaacagcggtgtttttgtgggttggtggctggctgtgctggcggttatggcgcagcggtaaagcgactgaccgtttgagtcattatttgtcccgcggtcgtttgttgtggctgacgccgttgatttctgccatcggcgtggtggcgctggtggtgttaattcgccacccgttgatgccggtgtatatcgatattttgcgtaaagtggttggggtttaagagatagtcttgtgcgggttgcctgatgcgacgcttgccgcgtcttatcaggcctacaaaacgcactacccgtaggtcggataaggcgttcacgccgcatccgacagtgcatattaacccgtaatccccaatagtgcgctagcactcgccttaccgctcaacaactcattggtcataccctgccaggcgatgcgcccgtcggcgactactacgctgcgcgtggcgatccgcgccgcatcttccacgctgtggctcaccatcaatagcgtcattttttgctgctggcagctcgtgctcaccagcgtcaacatctcctgacgtaacgccggatcgagcgcagagaacggttcatcgagcaataaaatcggctgttcgcgtaccagacaacgcgctaacgccactcgctgtcgctgaccgccggaaagctcgcccggtaaccgcgccattaaattatcaatccccatctggcgggcgatagcgtgcattttcccctgctgtaccgcgttcagtttcaatcccggatttagccccagcccgatgttctgtgcgaccgtcaggtggctgaacaggttgttctcctgaaacagcatgctcaccggacggcgactcggcggcatagttgtgtgatctacgccatcgatagtcaggctaccgctggctggcgtcagaaaaccggcgatcaaattcagcagggtacttttacccgcgccgcttggcccgaggatcgccacctgctcgccgcgttccaccgttaagctaaaacgcatcggcaaatggtggtaaagccaggtgatatcagtcagttttaacatttcgccccggtagtttttcaatcacggtaaacagcagaaaacagagcagcagcagaattaacgcggtgaccgcaccgtcctggctgcgataggagccaatttgctggtagagataaaacggcagggtgcggaaatcatcgttaccgaacaacgccaccacgccaaaatcaccaatgctcagcacgcatgcaaaggccagcgcctgcgccagtggacgtttcagggcgcgcagctccaccacttttaagcgactccagccttcaatccccaggctctgacataacatgctgtagcgggcggtgatatcgcgcatcgggttttccagcactttcagcgcataagggatcgccattaacgcattggtgaaaatcacaatgccgtcagcagattgtggcaggccgatagtgttgttgagcagtaaaaagaagccggtagccagcacaatccccggcatggcgaggatcaacatgccgctcatctccagcacctgacccgccagcattttctgccgcgcccgcagttcgcgactgctccatagcagcatcatggtcagcactacgcacaatacacctgccgccagcgcaatacgcaagctggtccacagcgcctgccacagcaccggttgtgccagcacttccggcaactggcgatttaccccatcgacgatcaccgccagtaacggtggcagcaacagcagcagcgccagcacaattaacaccgtgtcgcaaatgcggctatgcagacgatcgtccgggtcgcgccagccttgcagcagcgtggtgccgggcgcaatggccttactcaatcgctgactcaacagcaccagcccgaggcagcacaccatctggagcagcgccagcattgccgcgcgggcaggatcgtagtcgtaactcagcgcctgatagattgccagctcgatagtggtcgcctgcggaccgccccccaggcttagcacggtggcgaagctggcgaaacagagcataaagataagcgcagcaaccggcgggatttgtcgccgtaaccacggccattcgacgaagcggaaaaaatgccagctacgcatcccaagctgggcggcaagttgacgctgttcgccggggatgttttccagtgcctggagtaataagcggctcgccatcggcagattaaaaaacacatgggccagcaaaataccttgcaggccgtaggggctaaaggtccactccagaccgaggctttggcagagtgttgccagccagccctggcgaccatagacgctaagaatgccgaaaacagcgaccaacaccgggaggatcaaggtcattgcacacagacgcaacagcgccagccgacccggaaagcgcctgcgatagagcgcgcgggcgaggaatatcgcgggtatgacagagagcagtgcgctgagaaacgcctgccagaaggagaagcgcaccacatgccacagatagctgtcctgccagactgccacccagtcatcctgcggcgcgttccaccacagggcgagaaacgccgccagcgcaaccgctaccaccagcgtggtggcgcttacacctggaattaaccagccgggaattaacggctgacggcgcgttgccattcgctaatccatgcctgacgttgtgccgccacttcggctggcgtgaactccaacgtggttgcgggtttggtcaatttttcaaaaccggcaggcagcgtgacgtttgccaccggatacatccagttgccggttgggatcgcattctggaaagccggagaaaccataaactggaggaatttttgcgccagctccggctgcttgctggcagcggtgcgggcggcgacttccacttgcagatagtgaccttcgctgaagttcgcggcggcgtagttatctttcttctcttcgagaatgtgataagccggagaggtggtgtaactcagtaccagatcgctttcaccttttaaaaacaggccgtaggcttcgctccagcctttggtgaccgtgaccgttttcttcgccagtttctgccaggcttgtggggcgtcatcgccatagactttttgcatccatagcaacagacccagccccggtgtactggtgcgcggatcctgataaatcacccgccagttttgatcgctctcaaccagttctttcaggctttgtggcgggtttttcagtttgttcttgtcataaacgaaggcgaagtagccataatcaaacggtacgaaagtgtcattattccagccgccgggaacgttaacggcatccgctgccacaccgcttttggcaaacagtccggttttactggcggcgtctaacaggttgttatccagccccagcaccacatcggctttactgtttttgccttccatccgtagacggttgagaaggctaacgccatcttccagcgccaccagtttcagttcgcaattacagtcggcttcaaaggcttttttaaccaccggaccaggcccccagtcggcggcgaaggaatcgtaggtataaacagtcagaacgggtttagcgaaaacgggcgctgtgcacagcaacagcaggggcagacatttttttaacactttgcacctcaaaaaagagtggcaaaggacttgagaaggagcctcaaatcccttcgccggcgttatccggatcaggttcgacgggtattttctcagcgcacgcgtacgcgtggcaccccgttgagaacggcgttagtgtagtgattttgttatcaaccagcaatcatggatccggtggcgcaaaccacgcacttttaaaatcgaaccagccgagggtattcatgcgcaggccgcgcatactgcgttgcccctgaatgatcagccagtggtgcaataatggcaccatcgctttgctggcgaccagttgctggcaccagttcgccagattcatctcgccattgcgccagcgagcagcgtcggcttgccagtcaatgggaatgcaatgttgtagcagtggcacttcgcataaatgtgcgaaaacagagaagtccagcggcagggtaaagttggcgctgtttagccagatatcactttcgatctctcctgtatgccactgatcgtagtcgatctctttgattttcagcgtgacctggtgacttgccagaatctgctgcatgatcccggcaatcacccgatgctcactgtgatcctgataaaaggttagggtgaggctttccaggccagccggtttttcgctctttatggtgcgggcatggtgccaacgggggagcagtccataagccgggaaccacagttgctggtactgttcctcagcgaaatagaccagattagttggagaaagcacatagcttacccagtccctgacttgctgattcgccccgcgatgggtgcggctgtcgaacagtaaatagtagcaaccttcctccaggcggctttcaatctctttttcctcgccctgtggaccttttagcatcagccctccggctggctcgtcggcaatttccggcagaacccagacgttaacttcgtcgattaatgcccggtaaccgaagaagtcatcgaatgcctgaattttcagttgattggtgctgttgcgaatcaccgcatacggaccggtgccgatgggatggctggcaaagttactgagggtttcccattcgcgcggcaggatcatcgccggaacttgccccagcagtaacggtaaccagcggtccggttgcgtgagatggatatccagcgtccagggcgtcgggctcacaatgtcagcaatatggctatagagcggcagcgtattgattcgttttaaagaggcgatcacatcgtccatttccagttcacgaccatggtgaaaatggactcctggacgcaaaaagaaacgccagtgaagcggactaatttgctgccagtggtgggcgatgtctgcttccagttccccattttcctcatttatgcgcgttaggctactgaagatttgccgggcgatatgggtttcggaacggcgcaatgcgctgccaggtagcagattacgcaacggacgatagtagagcacgcgcaggatgtgccgcccctggcggaagctgcggcccagatgagaaaccagcatttgccgcacagtcgctttgtcgccaaccaactgcaccagttgatcgatacgatcctgctccagcaggtcttccgcccgctgttgctgaagcgccagcccggtatagaggaatgtcagacggctgcgtttaccgcgcccgacttccgcttcccacgtcagccagccgcgatcctgcatggtgttgagcagggtgcgcatatgacgacggctgcagctcaataacgctgccagttcgttgagcgttgtgtcctggcttttaccctcgcagcattgccacaggcggatgaactgttgttgcagacgagcagatggcataaaaggggaactcctgtgcaaaagacagcaattttattttccctatattaagtcaataattcctaacgatgaagcaagggggtgccccatgcgtcagttttatcagcactattttaccgcgacagcgaagttgtgctggttgcgttggttaagcgtcccacaacgattaaccatgcttgaaggactgatgcagtgggatgaccgcaattctgaaagttgacttgcctgcatcatgtgtgactgagtattggtgtaaaatcacccgccagcagattatacctgctggttttttttattctcgccgcgctaaaaagggaacgtatgatctggataatgacgatggctcgccgtatgaacggtgtttacgcggcatttatgctggtcgcttttatgatgggggtggccggggcgctacaggctcctacattgagcttatttctgagtcgtgaggttggcgcgcaacctttctggatcggcctcttttatacggtgaatgctattgctgggatcggcgtaagcctctggttggcaaaacgttctgacagtcagggcgatcggcgaaaactgattatattttgctgtttgatggctatcggcaatgcgctattgtttgcatttaatcgtcattatctgacgcttatcacctgtggtgtgcttctggcatctctggccaatacggcaatgccacagttatttgctctggcgcgggaatatgcggataacagcgcgcgagaagtggtgatgtttagcagcgtgatgcgtgcgcagctttctctggcatgggttatcggtccaccgttggcctttatgctggcgttgaattacggctttacggtgatgtttagcattgccgccgggatattcacactcagtctggtattgattgcatttatgcttccgtctgtggcgcgggtagaactgccgagcgaaaatgctttaagtatgcaaggtggctggcaggatagtaacgtacggatgttatttgtcgccagcacgttaatgtggacctgcaacaccatgtacattattgatatgccgttgtggatcagtagcgagttaggattgccagacaaactggcgggtttcctgatggggacggcagctggactggaaataccagcaatgattctggctggctactatgtcaaacgttatggtaagcggcgaatgatggtcatagcagtggcggcaggagtactgttttacaccggattgattttctttaatagccgtatggcgttgatgacgctgcaactttttaacgctgtatttatcggcattgttgcgggtattgggatgctatggtttcaggatttaatgcctggaagagcgggggcagctaccaccttatttactaacagtatttctaccggggtaattctggctggcgttattcagggagcaattgcacaaagttgggggcactttgctgtctactgggtaattgcggttatttctgttgtcgcattatttttaaccgcaaaggttaaagacgtttgatgacgtggacgatagcggaaagcccggtcatttgaccgggcaaggggattaattcataaacgcaggttgttttgcttcataagcggcaatggcgtcgtcgtgctgcaaggtaagcccaatactgtccagaccgttcatcatgcagtggcggcggaaggcatcgatggtaaagcgataggttttctctcccgctttcacctcttgcgcttccagatccacgtcgaaatggatccccggattagctttcaccagcgcaaacagttcgtccacttctgcatcgcttaatttcaccggcagcagctggttgttaaagctattgccgtagaagatgtcagcaaaactcggcgcaatcaccactttaaaaccgtagtcggtcaatgcccagggcgcgtgctcacggctagagccacagccgaagttttctcgtgccagcaaaatggaagcgccctgatactgcgggaagttcagcacgaagtccgggtttggctgttggcctttttcatccagaaaacgccagtcgttaaacagatgcgcgccaaaacccgtacgggtcactttctgcaaaaactgtttcgggatgattgcatcggtatcgacattggcggcatccagcggaaccaccaggcctgtgtgtttgataaatttctctgccatggtgtgctccttatttaatgttgcgaatgtcggcgaaatgtccggtcacagcagcagcggcagccattgccgggctgaccagatgcgtgcgcccgccgcgcccctggcggccttcaaagttacggttgctggtggaggcacaacgttcgcccggattcagacggtcgttgttcatcgccagacacatactgcagccaggcaagcgccattcaaaaccggcttcaataaagattttatccagaccttccgcttccgcctgggcttttaccgggccagagccgggaaccaccagtgcctgcacgcctggcgcgacttttcgccctttggcgatctccgctgccgcgcgtaaatcttcaatgcggctgttggtacaggaaccgataaacactttgtcgatagccacttcggtcagcggaatacccggtttcagccccatataggccagcgctttttctgcgctcgcgcgttcaaccggatcggcaaagctagccggatcgggaatattgtcgttcacggaaatcacctggccgggattggtgccccaggtgacctgcggactaatttcttctgcttgcagagtgacaacggtatcgaaagttgcgccttcgtcggtttgcagggttttccagtaggcaacggcgtcgtcgaaatctttgcctttcggcgcatgcagacggcctttgacatagttaaaggtggtttcgtccggtgcaaccagaccggcttttgcgcccatttcgattgccatattgcacagggtcatacgaccttccatgcttaaatcacggattgcttcgccgcaaaactccaccacatgcccggtgccgcctgcgctaccggttttaccgataattgccagcacgatatcttttgcggtaatgcccggcgcggctttgccctggacttcaattttcatggtttttgcgcggccctgtttcagggtttgcgttgccagtacgtgttcaacttcggaagtgccgataccaaaggccagtgcgccaaacgcgccgtgggtggcggtatggctgtcgccgcagacaatggtcatccccggcaaggtgacgccctgttccggccccattacgtggacgatcccctgatacgggtgattcaggtcatacagttcgacgccaaattctttgcagtttttgatcagttcctgcatctggatacgcgccatttcaccgcaggcattaatgtctttggtctgggtagagacgttgtgatccatggtagcgaaggttttgcccggctgacgtaccgggcgaccgtgggcgcgcagaccatcgaacgcctgcggactggtcacttcatgcaccaggtggcggtcgatatataacagtggggtttcgttttcggcttcgtacacaacgtgagcgtcgaacaatttttcgtataacgtcttagccatgattacaccccttctgctacatagcgggcaatgatatcgcccatttcatcggtactaacggcggcagcgccacgggctaaatccccggtgcgaatgccttcttctaatgcgcggttaatggcgcgttcaatggcgcaagccgcatcatcggcatccaggctgtaacgcagcagcagtgccaggctaaggatttgtgcaatcgggttggcgatgtttttgcctgcgatatctggtgcgctgccgcccgccggttcatacagtccaaaaccttgctcgttcaggctggcggaaggcaacatccccatgctgccagtgatcattgcgcactcgtcagacagaatgtcgccaaacaggttggagcacagcagaacgtcaaactgacttggatctttaatcagctgcatggtggcgttgtcgatgtacatatgcgccagttcgacatccgggtattccgtggcgatctcgttaacgatctcccgccataaaatagaggattgcagcacgttggctttatcgatgctcgtcactttgtggcgacgcttgcgagcagattcaaacgcgatgcgggcgatacgttcgatctcaaaacggtgatacacctcggtatcaaaggctttttcatattgtccgctaccttcgcggccttttggctgaccgaaatagatgccgccggtcagttcgcgcacacacaggatgtcgaagccgtttgcggcaatgtctgcacgcagcggacagaatgcttccagcccctgatacagttttgccgggcgcaggttgctgaataatttgaagtgcttacgcagaggcagcagcgcgccgcgttctggttgctggtctggtggtaaatgttcccacttcgggccgcctacgctgccaaacagcacggcatcggcttgctcacaaccttcaaccgtcgcaggcggcagtggttgcccgtggttatcaatggctgcgccgcctacatcgtaatggctggtggtgatgcgcatcgcaaagcggttgcgcacggcatccagcactttcagcgcctgggtcatcacttccggaccaataccgtcccccggcaatacggcaatatggtaattcttgctcatcacacggtttccttgttgttttcgttgtgttgagctttgcgttgcaactctttttcgacttctgcggcacgccagatattgttcagaacgtgcaccatggctttggcagaactctcgacaatatcggtagccaggccgacgccgtggaagcggcgaccgttgtagttagcgacgatatccacctgacccagcgcatctttaccgtggcctttggcggtcaggctgtatttcaccagttcgacgttatattcagtgatgcggttaattgcctgatagacggcatcgaccggaccgttaccgttggcggcttctgctttgacttcttcgccacaggccagtttgacggcggcggtggcgatatcgttagagccagactgcacgctgaagtaatccagacggaaatgctccggctcttcttgctgcttaccgatgaaggccagcgcctccagatcgtaatcaaacacctgaccttttttgtccgccagcttcaggaaagcatcgtacaaattgtctaaattatattcactttctttataccccatctcatccatgcgatgtttcaccgccgcacgcccgctacgagaggtcagattcagctggatttggttcagaccaatagattctggtgtcatgatttcgtagttttcgcggtttttcagcacgccatcctggtgtataccggaggagtgtgcgaatgcgccgctgccaacaatggctttgtttgccgggatcggcatattacaaatctggctaactaactggctggtgcgccatatctcctggtgattaatggcggtgtggacgttgagaatatccttacgaactttgatcgccatgatgacttcttccagggaacagtttccggcacgctcgccgatcccgttcattgcgccttccacctggcgtgcaccggcatgtaccgccgccagactgtttccgaccgccaggcccaaatcgtcgtgggtatgtacggagataatggctttgtcgatgttaggcacgcgttcatacaggccgctgatgattccggcgaactcaaacggcatggtgtagcccacggtgtccggaatgttgatggtggtggcaccggcattaatcgccgcttcgaccactcgcgccagatcggcaatgggtgtacgcccggcatcttcgcaagaaaattcaacatcatcggtgtaattacgggcgcgtttcaccatatagatagcgcgttcgatcacctcgtccagcgtgctgcgcagcttggtggcgatgtgcattgggctagtggcaataaaggtatgaatacggaaggcttcggcgactttcagggattcggccgccacgtcgatatctttttccacgcagcgagctaacgcacatacgcggctgtttttaacctggcgggcgatggtttgcacgctttcaaaatcgcccgggctagagacggggaaaccgacttccatcacgtcaacacccatacgctcaagggccagcgcaatttgcagtttttctttcacactcaagcttgcctgtaacgcctgttcaccgtcgcgcaatgtggtatcgaaaataatgacttgctggctcatggtttgggtccttgtctcttttagagcgcctcgcttcgggcataaaaaaacccgcgcaatggcgcgggttttttgtttgactgcgtgctggcttaatgctggatgccgctcactcgtctaccgcgcaaagaagatgcgtttagtagtagtagaccgataaagcgaacgatgtgagtcattaaatcagctccagatgaatgcgatatgcttttagagttactggatacaaaaacggatgtcaaccctgacgcaataaaaacgtcccgccagcgtgagttctgcatccgtaaaattagctaattgtgctgcggtggttaaagtaagcgatattaatttctgcttaactaccgacgcttttcatcggttgacatatttcagcataaatttttgcatctaatcaacgaggaaaaaggggacaaaatgcacgcgttgcaaaacctatcctgatgatttgtattgaattatatgttttgcgattttttttgatattgatttggtgaatattattgatcaattaatgttaagaattaatgcattaaatatataaattaattattaaataagcacatttaatccattttgtagatgattgagtattcgcggtagttatgattagattgttttcgcaacaaaaacattatggattattatgctgtggtaaatgactcattccacggcaatggattctgtttttatcagaacccgtatctttatgttttccgaattttactcattttgctttttcttattttatatgcatgataaatcatattcttcaggattatttctctgcattccaataagggaaagggagttaagtgtgacagtggagttaagtatgccagaggtacaaacagatcatccagagacggcggagttaagcaaaccacagctacgcatggtcgatctcaacttattaaccgttttcgatgccgtgatgcaggagcaaaacattactcgtgccgctcatgttctgggaatgagccaacctgcggtcagtaacgctgttgcacgcctgaaggtgatgtttaatgacgagctttttgttcgttatggccgtggtattcaaccgactgctcgcgcatttcaactttttggtagtgttcgtcaggcattgcaactagtacaaaatgaattgcctggtagtggttttgaacccgcgagcagtgaacgtgtatttcatctttgtgtttgcagcccgttagacagcattctgaccagccagatttataatcacattgagcagattgcgccaaatatacatgttatgttcaagtctagtttaaatcagaacactgaacatcagctgcgttatcaggaaacggagtttgtgattagttatgaagacttccatcgtcctgaatttaccagcgtaccattatttaaagatgaaatggtgctggtagccagcaaaaatcatccaacaattaagggcccgttactgaaacatgatgtttataacgaacaacatgcggcggttagcctcgatcgtttcgcgagttttagtcaaccttggtatgacacggtagataagcaagccagtatcgcgtatcagggcatggcaatgatgagcgtacttagcgtggtgagccaaacgcatttggtcgctattgcgccgcgttggctggctgaagagttcgctgaatccttagaattacaggtattaccgctgccgttaaaacaaaacagcagaacctgttatctctcctggcatgaagctgccgggcgcgataaaggccatcagtggatggaagagcaattagtcagtatttgcaaacgctaactgattgcagaataggtcagacatgaatgtctggtttattctgcattttttattgaatgtagaattttattctgaatgtgtgggctctctattttaggattaattaaaaaaatagagaaattgctgtaagttgtgggattcagccgatttattatcaatttaatcctctgtaatggaggattttatcgtttcttttcacctttcctcctgtttattcttattaccccgtgtttatgtctctggctgccaattgcttaagcaagatcggacggttaatgtgttttacacattttttccgtcaaacagtgaggcaggccatggagatgttgtctggagccgagatggtcgtccgaagccttatcgatcagggcgttaaacaagtattcggttatcccggaggcgcagtccttgatatttatgatgcattgcataccgtgggtggtattgatcatgtattagttcgtcatgagcaggcggcggtgcatatggccgatggcctggcgcgcgcgaccggggaagtcggcgtcgtgctggtaacgagcggtccaggggcgaccaatgcgattactggcatcgccaccgcttatatggattccattccattagttgtcctttccgggcaggtagcgaccagcttgataggttacgatgcctttcaggagtgcgacatggtggggattagccgaccggtggttaaacacagttttctggttaagcaaacggaagacattccgcaggtgctgaaaaaggctttctggctggcggcaagtggtcgcccaggaccagtagtcgttgatttaccgaaagatattcttaatccggcgaacaaattaccctatgtctggccggagagcgtcagtatgcgttcttacaatcccactactaccggacataaagggcaaattaagcgtgctctgcaaacgctggtagcggcaaaaaaaccggttgtctacgtaggcggtggggcaatcacggcgggctgccatcagcagttgaaagaaacggtggaggcgttgaatctgcccgttgtttgcagtttgatggggctgggggcgtttccggcaacgcatcgtcaggcactgggcatgctgggaatgcacggtacctacgaagccaatatgacgatgcataacgcggatgtgattttcgccgtcggggtacgatttgatgaccgaacgacgaacaatctggcaaagtactgcccaaatgccactgttctgcatatcgatattgatcctacttccatttctaaaaccgtgactgcggatatcccgattgtgggggatgctcgccaggtcctcgaacaaatgcttgaactcttgagccaagaatccgcccatcaaccactggatgagatccgcgactggtggcagcaaattgaacagtggcgcgctcgtcagtgcctgaaatatgacactcacagtgaaaagattaaaccgcaggcggtgatcgagactctttggcggttgacgaagggagacgcttacgtgacgtccgatgtcgggcagcaccagatgtttgctgcactttattatccattcgacaaaccgcgtcgctggatcaattccggtggcctcggcacgatgggttttggtttacctgcggcactgggcgtcaaaatggcgttgccagaagaaaccgtggtttgcgtcactggcgacggcagtattcagatgaacatccaggaactgtctaccgcgttgcaatacgagttgcccgtactggtggtgaatctcaataaccgctatctggggatggtgaagcagtggcaggacatgatctattccggccgtcatagtcaatcttatatgcaaagcctacccgatttcgtccgtctggcggaagcctatgggcatgtcgggatccagatttctcatccgcatgagctggaaagcaaacttagcgaggcgctggaacaggtgcgcaataatcgcctggtgtttgttgatgttaccgtcgatggcagcgagcacgtctacccgatgcagattcgcgggggcggaatggatgaaatgtggttaagcaaaacggagagaacctgattatgcgccggatattaagtgtcttactcgaaaatgaaagtggcgcgttatcccgcgtgattggccttttttcccagcgtggctacaacattgaaagcctgaccgttgcgccaaccgacgatccgacattaagccgtatgaccatccagaccgtgggcgatgaaaaagtacttgagcagatcgaaaagcaattacacaaactggtcgatgtcttgcgcgtgagtgagttggggcagggcgcgcatgttgagcgggaaatcatgctggtgaaaattcaggccagcggttacgggcgtgacgaagtgaaacgtaatacggaaatattccgtgggcaaattatcgatgtcacacccagcctttataccgttcaattagcaggcaccagcggtaagcttgatgcatttttagcaagcattcgcgatgtggcgaaaattgtggaggttgctcgctctggtgtggtcggacttagccgcggcgataaaataatgcgttgagaatgatctcaatgcgcaatttacagcccaacatgtcacgttgggctttttttgcgaaatcagtgggaacctggaataaaagcagttgccgcagttaattttctgcgcttagatgttaatgaatttaacccataccagtacaatggctatggtttttacattttacgcaaggggcaattgtgaaactggatgaaatcgctcggctggcgggagtgagccggaccactgcaagctatgttattaacggcaaagcgaagcaataccgtgtgagcgacaaaaccgttgaaaaagtcatggctgtggtgcgtgagcacaattaccacccgaacgccgtggcagctgggcttcgtgctggacgcacacgttctattggtcttgtgatccccgatctggagaacaccagctatacccgcatcgctaactatcttgaacgccaggcgcggcaacggggttatcaactgctgattgcctgcagtgaagatcagccagacaacgaaatgcggtgcattgagcaccttttacagcgtcaggttgatgccattattgttagcacgagcttgcctcctgagcatcctttttatcaacgctgggctaacgacccgttcccgattgtcgcgctggaccgcgccctcgatcgtgaacacttcaccagcgtggttggtgccgatcaggatgatgccgaaatgctggcggaagagttacgtaagtttcccgccgagacggtgctttatcttggtgcgctaccggagctttctgtcagcttcctgcgtgaacaaggtttccgtactgcctggaaagatgatccgcgcgaagtgcatttcctgtatgccaacagctatgagcgggaggcggctgcccagttattcgaaaaatggctggaaacgcatccgatgccgcaggcgctgttcacaacgagctttgcgttgttgcaaggagtgatggatgtcacgctgcgtcgcgacggcaaactgccttctgacctggcaattgccacctttggcgataacgaactgctcgacttcttacagtgtccggtgctggcagtggctcaacgtcaccgcgatgtcgcagagcgtgtgctggagattgtcctggcaagcctggacgaaccgcgtaagccaaaacctggtttaacgcgcattaaacgtaatctctatcgccgcggcgtgctcagccgtagctaagccgcgaacaaaaatacgcgccaggtgaatttccctctggcgcgtagagtacgggactggacatcaatatgcttaaagtaaataagactattcctgactattattgataaatgcttttaaacccgcccgttaattaactcaccagctgaaattcacaataattaagtgatatcgacagcgcgtttttgcattattttgttacatgcggcgatgaattgccgatttaacaaacacttttctttgcttttgcgcaaacccgctggcatcaagcgccacacagacgtaacaaggactgttaaccggggaagatatgtcctaaaatgccgctcgcgtcgcaaactgacactttatatttgctgtggaaaatagtgagtcattttaaaacggtgatgacgatgagggattttttcttacagctattcataacgttaatttgcttcgcacgttggacgtaaaataaacaacgctgatattagccgtaaacatcgggttttttacctcggtatgccttgtgactggcttgacaagcttttcctcagctccgtaaactcctttcagtgggaaattgtggggcaaagtgggaataaggggtgaggctggcatgttccggggagcaacgttagtcaatctcgacagcaaagggcgcttaagtgtgcctacccgttatcgggaacagctgcttgagaacgctgccggtcaaatggtttgcaccattgacatttatcacccgtgcctgctgctttaccccctgcctgaatgggaaattatcgagcaaaaattaagccgtctgagcagcatgaacccggttgagcgccgtgtgcagcgcctactgttaggtcatgccagcgaatgtcagatggatggcgcaggtcgattgttaatcgcgccagtactgcggcaacatgccgggctgacaaaagaagtgatgctggttggacagttcaacaagtttgagctgtgggatgaaacaacctggcatcaacaggtcaaggaagatatcgacgcagagcagttggctaccggagacttaagcgagcgactgcaggacttgtctctataaaatgatggaaaactataaacatactacggtgctgctggatgaagccgttaatggcctcaatatccgtcctgatggcatctacattgatgggacttttggtcgcggtggtcacagtcgtctgatcctcagccagcttggcgaagaggggcgtttgctggcgatcgatcgcgacccgcaggctatcgccgttgcgaagactattgatgatccgcgcttctccatcatccacggacctttctccgcgctgggcgaatacgttgccgagcgcgatcttatcggcaagatcgacggcattctcctcgatcttggcgtctctagtccgcaacttgatgatgctgaacgtggcttttcctttatgcgcgatggtccgctggacatgcgtatggacccaacccgtgggcagagtgccgctgaatggctacaaaccgcagaagaagccgatatcgcctgggtattgaaaacctatggtgaagagcgttttgccaaacgcattgcccgcgccattgtcgagcgtaaccgcgaacagccgatgacccgcaccaaagaactggcggaagtcgtggctgctgcaacgccggtgaaagataagtttaaacatcccgcgacccgtaccttccaggcggtgcgcatttgggtaaacagtgaactggaggagatagagcaggcgctaaaaagcagcctcaacgtgctggccccgggtgggcggcttagcatcatcagcttccacagcctggaagaccgtattgtgaaacgttttatgcgtgaaaacagccgcggtccgcaagttccggcagggttaccgatgactgaagagcagctcaaaaaactgggtggccgtcagctgcgagcactaggcaagttaatgccgggcgaagaagaggtggctgagaaccctcgtgcccgtagtagtgttctgcgtattgcagagaggacgaatgcatgatcagcagagtgacagaagctctaagcaaagttaaaggaagcatgggaagccacgagcgccatgcattgcctggtgttatcggtgacgatcttttgcgatttgggaagctgccactctgcctgttcatttgcattattttgacggcggtgactgtggtaaccacggcgcaccatacccgtttactgaccgctcagcgcgaacaactggtgctggagcgagatgctttagacattgaatggcgcaacctgatccttgaagagaatgcgctcggcgaccatagccgggtggaaaggatcgccacggaaaagctgcaaatgcagcatgttgatccgagtcaagaaaatatcgtagtgcaaaaataaggataaacgcgacgcatgaaagcagcggcgaaaacgcagaaaccaaaacgtcaggaagaacatgccaactttatcagttggcgttttgcgttgttatgcggctgtattctcctggcgctggcttttctgctcggacgcgtagcgtggttacaagttatctccccggatatgctggtgaaagagggcgacatgcgttctcttcgcgttcagcaagtttccacctcccgcggcatgattactgaccgttctggtcgcccgttagcggtgagcgtgccggtaaaagcgatttgggctgacccgaaagaagtgcatgacgctggcggtatcagcgtcggtgaccgctggaaggcgctggctaacgcgctcaatattccgctggatcagcttagtgcccgcattaacgccaacccgaaagggcgctttatttatctggcgcgtcaggtgaaccctgacatggcggactacatcaaaaaactgaaactgccggggattcatctgcgtgaagagtctcgccgttactatccgtccggcgaagtgactgctcacctcatcggctttactaacgtcgatagtcaagggattgagggcgttgagaagagtttcgataaatggcttaccgggcagccgggtgagcgcattgtgcgtaaagaccgctatggtcgcgtaattgaagatatttcttctactgacagccaggcagcgcacaacctggcgctgagtattgatgaacgcctgcaggcgctggtttatcgcgaactgaacaacgcggtggcctttaacaaggctgaatctggtagcgccgtgctggtggatgtcaacaccggtgaagtgctggcgatggctaacagcccgagttacaaccctaacaatctgagcggcacgccgaaagaggcgatgcgtaaccgtaccatcaccgacgtgtttgaaccgggcagtacggttaaaccgatggtggtaatgaccgcgttgcaacgtggcgtggtgcgggaaaacagcgtactcaataccattccttatcgaattaacggccacgaaatcaaagacgtggcacgctacagcgaattaaccctgaccggggtattacagaagagcagtaacgtcggtgtttccaagctggcgttagcgatgccgtccagtgcgttagtagatacttacagtcgttttggactgggaaaagcgaccaatttggggttggtcggagaacgcagtggcttatatcctcaaaaacaacggtggtctgacatagagagggccaccttctctttcggctacgggctaatggtaacaccattacagttagcgcgagtctacgcaactatcggcagctacggcatttatcgcccactgagcattaccaaagttgaccccccggttcccggtgaacgtgtcttcccggaatccattgtccgcactgtggtgcatatgatggaaagcgtggcgctaccaggcggcggcggcgtgaaggcggcgattaaaggctatcgtatcgccattaaaaccggtaccgcgaaaaaggtcgggccggacggtcgctacatcaataaatatattgcttataccgcaggcgttgcgcctgcgagtcagccgcgcttcgcgctggttgttgttatcaacgatccgcaggcgggtaaatactacggcggcgccgtttccgcgccggtctttggtgccatcatgggcggcgtattgcgtaccatgaacatcgagccggatgcgctgacaacgggcgataaaaatgaatttgtgattaatcaaggcgaggggacaggtggcagaagctaattaataatcaaggcgaggggacaggtggcagatcgtaatttgcgcgaccttcttgctccgtgggtgccagacgcacctagccgagcactgcgagagatgacactcgacagccgtgtggctgcggcgggcgatctctttgtagctgtagtaggtcatcaggcggacgggcgtcgatatatcccgcaggcgatagcgcaaggtgtggctgccattattgcagaggcgaaagatgaggcgaccgatggtgaaatccgtgaaatgcacggcgtaccggtcatctatctcagccagctcaacgagcgtttatctgcactggcgggccgcttttaccatgaaccctctgacaatttacgtctcgtgggcgtaacgggcaccaacggcaaaaccacgactacccagctgttggcgcagtggagccaactgcttggcgaaatcagcgcggtaatgggcaccgttggtaacggcctgctggggaaagtgatcccgacagaaaatacaaccggtagcgcagtcgatgttcagcatgagctggcggggctggtggatcagggcgcgacgttttgcgcaatggaagtttcctcccacgggctggtacagcaccgtgtggcggcattgaaatttgcggcgagcgtctttaccaacttaagccgcgatcaccttgattatcatggtgatatggaacactacgaagccgcgaaatggctgctttattctgagcatcattgcggtcaggcgattattaacgccgacgatgaagtgggccgccgctggctggcaaaactgccggacgcggttgcggtaagtatggaagatcatattaatccgaactgtcacggacgctggttgaaagcgaccgaagtgaactatcacgacagcggtgcgacgattcgctttagcagtagttggggcgatggcgaaattgaaagccatctgatgggcgcttttaacgtcagcaacctgctgctcgcgctggcgacactgttggcactcggctatccactggctgatctgctgaaaaccgccgcgcgtctgcaaccggtttgcggacgtatggaagtgttcactgcgccaggcaaaccgacggtggtggtggattacgcgcatacgccggatgcactggaaaaagccttacaggcggcgcgtctgcactgtgcgggcaagctgtggtgtgtctttggctgtggtggcgatcgcgataaaggtaagcgtccactgatgggcgcaattgccgaagagtttgctgacgtggcggtggtgacggacgataacccgcgtaccgaagaaccgcgtgccatcatcaacgatattctggcgggaatgttagatgccggacatgccaaagtgatggaaggccgtgctgaagcggtgacttgcgccgttatgcaggctaaagagaatgatgtggtactggtcgcgggcaaaggccatgaagattaccagattgttggcaatcagcgtctggactactccgatcgcgtcacggtggcgcgtctgctgggggtgattgcatgattagcgtaacccttagccaacttaccgacattctcaacggtgaactgcaaggtgcagatatcacccttgatgctgtaaccactgatacccgaaaactgacgccgggctgcctgtttgttgccctgaaaggcgaacgttttgatgcccacgattttgccgaccaggcgaaagctggcggcgcaggcgcactactggttagccgtccgctggacatcgacctgccgcagttaatcgtcaaggatacgcgtctggcgtttggtgaactggctgcatgggttcgccagcaagttccggcgcgcgtggttgctctgacggggtcctccggcaaaacctccgttaaagagatgacggcggcgattttaagccagtgcggcaacacgctttatacggcaggcaatctcaacaacgacatcggtgtaccgatgacgctgttgcgcttaacgccggaatacgattacgcagttattgaacttggcgcgaaccatcagggcgaaatagcctggactgtgagtctgactcgcccggaagctgcgctggtcaacaacctggcagcggcgcatctggaaggttttggcagccttgcgggtgtcgcgaaagcgaaaggtgaaatctttagcggcctgccggaaaacggtatcgccattatgaacgccgacaacaacgactggctgaactggcagagcgtaattggcagtcgcaaagtgtggcgtttcagtcccaatgccgccaacagcgatttcaccgccaccaatatccatgtgaccagccacggtacggaatttaccctacaaaccccaaccggtagcgtcgatgttctgctgccgttgccggggcgtcacaatattgcgaatgcgctggcagccgctgcgctctccatgtccgtgggcgcaacgcttgatgctatcaaagcggggctggcaaatctgaaagctgttccaggccgtctgttccccatccaactggcagaaaaccagttgctgctcgacgactcctacaacgccaatgtcggtagtatgactgcagcagtccaggtactggctgaaatgccgggctaccgcgtgctggtggtgggcgatatggcggaactgggcgctgaaagcgaagcctgccatgtacaggtgggcgaggcggcaaaagctgctggtattgaccgcgtgttaagcgtgggtaaacaaagccatgctatcagcaccgccagcggcgttggcgaacattttgctgataaaactgcgttaattacgcgtcttaaattactgattgctgagcaacaggtaattacgattttagttaagggtagtcgtagtgccgccatggaagaggtagtacgcgctttacaggagaatgggacatgttaatataagctttacaggagaatgggacatgttagtttggctggccgaacatttggtcaaatattattccggctttaacgtcttttcctatctgacgtttcgcgccatcgtcagcctgctgaccgcgctgttcatcagtttgtggatgggcccgcgtatgattgctcatttgcaaaaactttcctttggtcaggtggtgcgtaacgacggtcctgaaagtcacttcagcaagcgcggtacgccgaccatgggcgggattatgatcctgacggcgattgtgatctccgtactgctgtgggcttacccgtccaatccgtacgtctggtgcgtgttggtggtgctggtaggttacggtgttattggctttgttgatgattatcgcaaagtggtgcgtaaagacaccaaagggttgatcgctcgttggaagtatttctggatgagcgtcattgcgctgggtgtcgccttcgccctgtaccttgccggcaaagacacgcccgcaacgcagctggtggtcccattctttaaagatgtgatgccgcagctggggctgttctacattctgctggcttacttcgtcattgtgggtactggcaacgcggtaaacctgaccgatggtctcgacggcctggcaattatgccgaccgtatttgtcgccggtggttttgcgctggtggcgtgggcgaccggcaatatgaactttgccagctacttgcatataccgtatctgcgacacgccggggaactggttattgtctgtaccgcgatagtcggggcaggactgggcttcctgtggtttaacacctatccggcgcaggtctttatgggcgatgtaggtagcctggcgttaggtggtgcgttaggcattatcgccgtactgctacgtcaggaattcctgctggtgattatggggggcgtgttcgtggtagaaacgctttctgtcatcctgcaggtcggctcctttaaactgcgcggacaacgtattttccgcatggcaccgattcatcaccactatgaactgaaaggctggccggaaccgcgcgtcattgtgcgtttctggattattagcctgatgctggttctgattggtctggcaacgctgaaggtacgttaatcatggctgattatcagggtaaaaatgtcgtcattatcggcctgggcctcaccgggctttcctgcgtggactttttcctcgctcgcggtgtgacgccgcgcgttatggatacgcgtatgacaccgcctggcctggataaattacccgaagccgtagaacgccacacgggcagtctgaatgatgaatggctgatggcggcagatctgattgtcgccagtcccggtattgcactggcgcatccatccttaagcgctgccgctgatgccggaatcgaaatcgttggcgatatcgagctgttctgtcgcgaagcacaagcaccgattgtggcgattaccggttctaacggcaaaagcacggtcaccacgctagtgggtgaaatggcgaaagcggcgggggttaacgttggtgtgggtggcaatattggcctgcctgcgttgatgctactggatgatgagtgtgaactgtacgtgctggaactgagcagcttccagctggaaaccacctccagcttacaggcggtagcagcgaccattctgaacgtgactgaagatcatatggatcgctatccgtttggtttacaacagtatcgtgcagcaaaactgcgcatttacgaaaacgcgaaagtttgcgtggttaatgctgatgatgccttaacaatgccgattcgcggtgcggatgaacgctgcgtcagctttggcgtcaacatgggtgactatcacctgaatcatcagcagggcgaaacctggctgcgggttaaaggcgagaaagtgctgaatgtgaaagagatgaaactttccgggcagcataactacaccaatgcgctggcggcgctggcgctggcagatgctgcagggttaccgcgtgccagcagcctgaaagcgttaaccacattcactggtctgccgcatcgctttgaagttgtgctggagcataacggcgtacgttggattaacgatagcaaagcgaccaacgtcggcagtacggaagcggcgctgaatggcctgcacgtagacggcacactgcatttgttgctgggtggcgatggtaaaagcgcggactttagcccactggcgcgttacctgaatggcgataacgtacgtctgtattgtttcggtcgtgacggcgcgcagctggcggcgctacgcccggaagtggcagaacaaaccgaaactatggaacaggcgatgcgcttgctggctccgcgtgttcagccgggcgatatggttctgctctccccagcctgtgccagccttgatcagttcaagaactttgaacaacgaggcaatgagtttgcccgtctggcgaaggagttaggttgatgcgtttatctctccctcgcctgaaaatgccgcgcctgccaggattcagtatcctggtctggatctccacggcgctaaagggctgggtgatgggcagccgggaaaaagataccgacagcctgatcatgtacgatcgcaccttactgtggctgaccttcggcctcgcggcgattggctttatcatggtgaccagcgcgagtatgcccatagggcaacgcttaaccaacgatccgttcttcttcgcgaagcgtgatggtgtctatctgattttggcgtttattctggcgatcattacgctgcgtctgccgatggagttctggcaacgctacagtgccacgatgctgctcggatctatcatcctgctgatgatcgtcctggtagtgggtagcagcgttaaaggggcaagccgttggatcgatctcggtttgctgcgtatccagcctgcggagctgacaaaactgagcctgttttgctatatcgccaactatctggtgcgtaaaggcgacgaagtacgtaataacctgcgcggcttcctgaaaccgatgggcgtgattctggtgttggcagtgttactgctggcacagccagaccttggtacggtggtggtgttgtttgtgactacgctggcgatgttgttcctggcgggagcgaaattgtggcagttcattgccattatcggtatgggcattagtgcggttgtgttgctgatactcgccgaaccgtaccgtatccgccgtgttaccgcattctggaacccgtgggaagatccctttggcagcggctatcagttaacgcaaagcctgatggcgtttggtcgcggcgaactttgggggcaaggtttaggtaacagcgtacaaaaactggagtatctgccggaagcgcacactgactttattttcgccattatcggcgaagaactggggtatgtcggtgtggtgctggcacttttaatggtattcttcgtcgcttttcgcgcgatgagcattggccgtaaagcattagaaattgaccaccgtttttccggttttctcgcctgttctattggcatctggtttagcttccaggcgctggttaacgtaggcgcggcggcggggatgttaccgaccaaaggtctgacattgccgctgatcagttacggtggtagcagcttactgattatgagcacagccatcatgatgctgttgcgtattgattatgaaacgcgtctggagaaagcgcaggcgtttgtacgaggtagtcgatgagtggtcaaggaaagcgattaatggtgatggcaggcggaaccggtggacatgtattcccgggactggcggttgcgcaccatctaatggctcagggttggcaagttcgctggctggggactgccgaccgtatggaagcggacttagtgccaaaacatggcatcgaaattgatttcattcgtatctctggtctgcgtggaaaaggtataaaagcactgatagctgccccgctgcgtatcttcaacgcctggcgtcaggcgcgggcgattatgaaagcgtacaaacctgacgtggtgctcggtatgggaggctacgtgagtggtccaggtggtctggccgcgtggagcttaggcattccggttgtacttcatgaacaaaacggtattgcgggcttaaccaataaatggctggcgaagattgccaccaaagtgatgcaggcgtttccaggtgctttccctaatgcggaagtagtgggtaacccggtgcgtaccgatgtgttggcgctgccgttgccgcagcaacgtttggctggacgtgaaggtccggttcgtgtgctggtagtgggtggttctcagggcgcacgcattcttaaccagacaatgccgcaggttgctgcgaaactgggtgatagtgtcactatctggcatcagagcggcaaaggtagccaacaatccgttgaacaggcgtatgccgaagcggggcaaccgcagcataaagtgacggaatttattgatgatatggcggcggcgtatgcgtgggcggatgtcgtcgtttgccgctccggtgcgttaacggtgagtgaaatcgccgcggcaggactaccggcgttgtttgtgccgtttcaacataaagaccgccagcaatactggaatgcgctaccgctggaaaaagcgggcgcagccaaaattatcgagcagccacagcttagcgtggatgctgtcgccaacaccctggccgggtggagccgagaaaccttattaaccatggcagaacgcgcccgcgctgcatccattccggatgccaccgagcgagtggcaaatgaagtgagccgggttgcccgggcgtaattgtagcgatgccttttgcatcgtatgaatttaagaagttaatggcgtaaagaatgaatacacaacaattggcaaaactgcgttccatcgtgcccgaaatgcgtcgcgttcggcacatacattttgtcggcattggtggtgccggtatgggcggtattgccgaagttctggccaatgaaggttatcagatcagtggttccgatttagcgccaaatccggtcacgcagcagttaatgaatctgggtgcgacgatttatttcaaccatcgcccggaaaacgtacgtgatgccagcgtggtcgttgtttccagcgcgatttctgccgataacccggaaattgtcgccgctcatgaagcgcgtattccggtgatccgtcgtgccgaaatgctggctgagttaatgcgttttcgtcatggcatcgccattgccggaacgcacggcaaaacgacaaccaccgcgatggtttccagcatctacgcagaagcggggctcgacccaaccttcgttaacggcgggctggtaaaagcggcgggggttcatgcgcgtttggggcatggtcggtacctgattgccgaagcagatgagagtgatgcaagcttcctgcatctgcaaccgatggtggcgattgtcaccaatatcgaagccgaccacatggatacctaccagggcgactttgagaatttaaaacagacttttattaattttctgcacaacctgccgttttacggtcgtgcggtgatgtgtgttgatgatccggtgatccgcgaattgttaccgcgagtggggcgtcagaccacgacttacggcttcagcgaagatgccgacgtgcgtgtagaagattatcagcagattggcccgcaggggcactttacgctgctgcgccaggacaaagagccgatgcgcgtcaccctgaatgcgccaggtcgtcataacgcgctgaacgccgcagctgcggttgcggttgctacggaagagggcattgacgacgaggctattttgcgggcgcttgaaagcttccaggggactggtcgccgttttgatttcctcggtgaattcccgctggagccagtgaatggtaaaagcggtacggcaatgctggtcgatgactacggccaccacccgacggaagtggacgccaccattaaagcggcgcgcgcaggctggccggataaaaacctggtaatgctgtttcagccgcaccgttttacccgtacgcgcgacctgtatgatgatttcgccaatgtgctgacgcaggttgataccctgttgatgctggaagtgtatccggctggcgaagcgccaattccgggagcggacagccgtagcctgtgtcgcacaattcgtggacgtgggaaaattgatcccattctggtgccggatccggcgcgggtagccgagatgctggcaccggtattaaccggtaacgacctgattctcgttcagggggctggtaatattggaaaaattgcccgttctttagctgaaatcaaactgaagccgcaaactccggaggaagaacaacatgactgataaaatcgcggtcctgttgggtgggacctccgctgagcgggaagtttctctgaattctggcgcagcggtgttagccggactgcgtgaaggcggtattgacgcgtatcctgtcgacccgaaagaagtcgacgtgacgcaactgaagagcatgggctttcagaaagtgtttatcgcgctacacggtcgcggcggtgaagatggtacgctgcaggggatgctcgagctgatgggcttgccttataccggaagcggagtgatggcatctgcgcttagtatggataaactacgcagcaaacttctatggcaaggtgccggtttaccggtcgcgccgtgggtagcgttaacccgcgcagagtttgaaaaaggcctgagcgataagcagttagcagaaatttctgctctgggtttgccggttatcgttaagccgagccgcgaaggttccagtgtgggaatgagtaaagtagtagcagaaaatgctctacaagatgcattaagattggcatttcagcacgatgaagaagtattgattgaaaaatggctaagtgggccggagttcacggttgcgatactcggtgaagaaattttaccgagtatacgtattcaaccgtccggaaccttctatgattatgaggcgaagtatctctctgatgagacacagtatttctgccccgcaggtctggaagcgagtcaagaggccaatttgcaggcattagtgctgaaagcatggacgacgttaggttgcaaaggatggggacgtattgacgttatgctggacagcgatggacagttttatctgctggaagccaataccagtccgggtatgaccagccacagcctggtgccgatggcggcacgtcaggcaggtatgagcttcagccagttggtagtacgaattctggaactggcggactaatatgagccaggctgctctgaacacgcgaaacagcgaagaagaggtttcttctcgccgcaataatggaacgcgtctggcggggatccttttcctgctgaccgttttaacgacagtgttggtgagcggctgggtcgtgttgggctggatggaagatgcgcaacgcctgccgctcagtaagctggtgttgaccggtgaacgccattacacacgtaatgacgatatccggcagagcatcctggcattgggtgagccgggtacctttatgacccaggatgtcaacatcatccagacgcaaatagaacaacgcctgccgtggattaagcaggtgagcgtcagaaagcagtggcctgatgaattgaagattcatctggttgaatatgtgccgattgcgcggtggaatgatcaacatatggtagacgcggaaggaaataccttcagcgtgccgccagaacgcaccagcaagcaggtgcttccaatgctgtatggcccggaaggcagcgccaatgaagtgttgcagggctatcgcgaaatggggcagatgctggcaaaggacagatttactctgaaggaagcggcgatgaccgcgcggcgttcctggcagttgacgctgaataacgatattaagctcaatcttggccggggcgatacgatgaaacgtttggctcgctttgtagaactttatccggttttacagcagcaggcgcaaaccgatggcaaacggattagctacgttgatttgcgttatgactctggagcggcagtaggctgggcgcccttgccgccagaggaatctactcagcaacaaaatcaggcacaggcagaacaacaatgatcaaggcgacggacagaaaactggtagtaggactggagattggtaccgcgaaggttgccgctttagtaggggaagttctgcccgacggtatggtcaatatcattggcgtgggcagctgcccgagccgtggtatggataaaggcggggtgaacgacctcgaatccgtggtcaagtgcgtacaacgcgccattgaccaggcagaattgatggcagattgtcagatctctagcgtatatctggcgctttctggtaagcacatcagctgccagaatgaaattggtatggtgcctatttctgaagaagaagtgacgcaagaagatgtggaaaacgtcgtccataccgcgaaaagcgtgcgtgtgcgcgatgagcatcgtgtgctgcatgtgatcccgcaagagtatgcgattgactatcaggaagggatcaagaatccggtaggacttagcggcgtgcggatgcaggcaaaagtgcacctgatcacatgtcacaacgatatggcgaaaaacatcgtcaaagcggttgaacgttgtgggctgaaagttgaccaactgatatttgccggactggcaagtagttatagcgtattgacggaagatgaacgtgaactgggtgtctgcgtcgtcgatatcggtggtggtacaatggatatcgccgtttataccggtggggcattgcgccacactaaggtaattccttatgctggcaatgtcgtgaccagtgatatcgcttacgcctttggcacgccgccaagcgacgccgaagcgattaaagttcgccacggttgtgcgctgggttccatcgttggaaaagatgagagcgtggaagtgccgagcgtaggtggtcgtccgccacggagtctgcaacgtcagacactggcagaggtgatcgagccgcgctataccgagctgctcaacctggtcaacgaagagatattgcagttgcaggaaaagcttcgccaacaaggggttaaacatcacctggcggcaggcattgtattaaccggtggcgcagcgcagatcgaaggtcttgcagcctgtgctcagcgcgtgtttcatacgcaagtgcgtatcggcgcgccgctgaacattaccggtttaacggattatgctcaggagccgtattatagcacggcggtgggattgcttcactatgggaaagagagtcatcttaacggtgaagctgaagtagaaaaacgtgttacagcaagtgttggcagctggatcaagcgactcaatagttggctgcgaaaagagttttaatttttatgaggccgacgatgattacggcctcaggcgacaggcacaaatcggagagaaactatgtttgaaccaatggaacttaccaatgacgcggtgattaaagtcatcggcgtcggcggcggcggcggtaatgctgttgaacacatggtgcgcgagcgcattgaaggtgttgaattcttcgcggtaaataccgatgcacaagcgctgcgtaaaacagcggttggacagacgattcaaatcggtagcggtatcaccaaaggactgggcgctggcgctaatccagaagttggccgcaatgcggctgatgaggatcgcgatgcattgcgtgcggcgctggaaggtgcagacatggtctttattgctgcgggtatgggtggtggtaccggtacaggtgcagcaccagtcgtcgctgaagtggcaaaagatttgggtatcctgaccgttgctgtcgtcactaagcctttcaactttgaaggcaagaagcgtatggcattcgcggagcaggggatcactgaactgtccaagcatgtggactctctgatcactatcccgaacgacaaactgctgaaagttctgggccgcggtatctccctgctggatgcgtttggcgcagcgaacgatgtactgaaaggcgctgtgcaaggtatcgctgaactgattactcgtccgggtttgatgaacgtggactttgcagacgtacgcaccgtaatgtctgagatgggctacgcaatgatgggttctggcgtggcgagcggtgaagaccgtgcggaagaagctgctgaaatggctatctcttctccgctgctggaagatatcgacctgtctggcgcgcgcggcgtgctggttaacatcacggcgggcttcgacctgcgtctggatgagttcgaaacggtaggtaacaccatccgtgcatttgcttccgacaacgcgactgtggttatcggtacttctcttgacccggatatgaatgacgagctgcgcgtaaccgttgttgcgacaggtatcggcatggacaaacgtcctgaaatcactctggtgaccaataagcaggttcagcagccagtgatggatcgctaccagcagcatgggatggctccgctgacccaggagcagaagccggttgctaaagtcgtgaatgacaatgcgccgcaaactgcgaaagagccggattatctggatatcccagcattcctgcgtaagcaagctgattaagaattgactggaatttgggtttcgaggctctttgtgctaaactggcccgccgaatgtatagtacacttcggttggataggtaatttggcgagataatacgatgatcaaacaaaggacacttaaacgtatcgttcaggcgacgggtgtcggtttacataccggcaagaaagtcaccctgacgttacgccctgcgccggccaacaccggggtcatctatcgtcgcaccgacttgaatccaccggtagatttcccggccgatgccaaatctgtgcgtgataccatgctctgtacgtgtctggtcaacgagcatgatgtacggattagtaccgtagagcacctcaatgctgctctcgcgggcttgggcatcgataacattgttatcgaagttaacgcgccggaaatcccgatcatggacggcagcgccgctccgtttgtatacctgctgcttgacgccggtatcgacgagttgaactgcgccaaaaaatttgttcgcatcaaagagactgttcgtgtcgaagatggcgataagtgggctgaatttaagccgtacaatggttttagcctggatttcaccatcgattttaaccatccggctattgattccagcaaccagcgctatgcgatgaacttctccgctgatgcgtttatgcgccagatcagccgtgcgcgtacgttcggtttcatgcgtgatatcgaatatctgcagtcccgtggtttgtgcctgggcggcagcttcgattgtgccatcgttgttgacgattatcgcgtactgaacgaagacggcctgcgttttgaagacgaatttgtgcgtcacaaaatgctcgatgcgatcggtgacttgttcatgtgtggtcacaatattattggtgcatttaccgcttataaatccggtcatgcactgaataacaaactgctgcaggctgtcctggcgaaacaggaagcctgggaatatgtgaccttccaggacgacgcagaactgccgttggccttcaaagcgcctagtgctgtactggcataacgacatttatactgtcgtataaaattcgactggcaaatctggcactctctccggccaggtgaaccagtcgtttttttttgaattttataagagctataaaaaacggtgcgaacgctgttttcttaagcacttttccgcacaacttatcttcattcgtgctgtggactgcaggctttaatgataagatttgtgcgctaaatacgtttgaatatgatcgggatggcaataacgtgagtggaatactgacgcgctggcgacagtttggtaaacgctacttctggccgcatctcttattagggatggttgcggcgagtttaggtttgcctgcgctcagcaacgccgccgaaccaaacgcgcccgcaaaagcgacaacccgcaaccacgagcctagtgccaaagttaactttggtcaattggccttgctggaagcgaacacacgccgcccgaatagcaactattccgttgattactggcatcaacatgccattcgcacggtaatccgtcatctttctttcgcaatggcaccgcaaacactgcccgttgctgaagaatctttgcctcttcaggcgcaacatcttgcattactggatacgctcagcgcgctgctgacccaggaaggcacgccgtctgaaaagggttatcgcattgattatgcgcattttaccccacaagcaaaattcagcacgcccgtctggataagccaggcgcaaggcatccgtgctggccctcaacgcctcacctaacaacaataaacctttacttcattttattaactccgcaacgcggggcgtttgagattttattatgctaatcaaattgttaactaaagttttcggtagtcgtaacgatcgcaccctgcgccggatgcgcaaagtggtcaacatcatcaatgccatggaaccggagatggaaaaactctccgacgaagaactgaaagggaaaaccgcagagtttcgtgcacgtctggaaaaaggcgaagtgctggaaaatctgatcccggaagctttcgccgtggtacgtgaggcaagtaagcgcgtctttggtatgcgtcacttcgacgttcagttactcggcggtatggttcttaacgaacgctgcatcgccgaaatgcgtaccggtgaaggaaaaaccctgaccgcaacgctgcctgcttacctgaacgcactaaccggtaaaggcgtgcacgtagttaccgtcaacgactacctggcgcaacgtgacgccgaaaacaaccgtccgctgtttgaattccttggcctgactgtcggtatcaacctgccgggcatgccagcaccggcaaagcgcgaagcttacgcagctgacatcacttacggtacgaacaacgaatacggctttgactacctgcgcgacaacatggcgttcagccctgaagaacgtgtacagcgtaaactgcactatgcgctggtggacgaagtggactccatcctgatcgatgaagcgcgtacaccgctgatcatttccggcccggcagaagacagcagcgaaatgtataaacgcgtgaataaaattattccgcacctgatccgtcaggaaaaagaagactccgaaaccttccagggcgaaggccacttcagcgtggacgaaaaatctcgccaggtgaacctgaccgaacgtggtctggtgctgattgaagaactgctggtgaaagagggcatcatggatgaaggggagtctctgtactctccggccaacatcatgctgatgcaccacgtaacggcggcgctgcgcgctcatgcgctgtttacccgtgacgtcgactacatcgttaaagatggtgaagttatcatcgttgacgaacacaccggtcgtaccatgcagggccgtcgctggtccgatggtctgcaccaggctgtggaagcgaaagaaggtgtgcagatccagaacgaaaaccaaacgctggctagcatcaccttccagaactacttccgtctgtatgaaaaactggcggggatgaccggtactgctgataccgaagctttcgaatttagcagtatctacaagctggataccgtcgttgttccgaccaaccgtccaatgattcgtaaagatctgccggacctggtctacatgactgaagcggaaaaaattcaggcgatcattgaagatatcaaagaacgtactgcgaaaggccagccggtgctggtgggtactatctccatcgaaaaaagcgagctggtgagtaacgaactgaccaaagccggtattaagcacaacgtcctgaacgccaaattccacgccaacgaagcggcgattgttgctcaggcaggttatccggctgcggtgactatcgcgaccaatatggcgggtcgtggtacagatattgtgctcggtggtagctggcaggcagaagttgccgcgctggaaaatccgaccgcagagcaaattgaaaaaattaaagccgactggcaggtacgtcacgatgcggtactggaagcaggtggcctgcatatcatcggtaccgagcgtcacgaatcccgtcgtatcgataaccagttgcgcggtcgttctggtcgtcagggggatgctggttcttcccgtttctacctgagcatggaagatgcgctgatgcgtatttttgcttccgaccgagtatccggcatgatgcgtaaactgggtatgaagccaggcgaagccattgaacacccgtgggtgactaaagcgattgccaacgcccagcgtaaagttgaaagccgtaacttcgacattcgtaagcaactgctggaatatgatgacgtggctaacgatcagcgtcgcgccatttactcccagcgtaacgaactgttggatgtcagcgatgtgagcgaaaccattaacagcattcgtgaagatgtgttcaaagcgaccattgatgcctacattccaccacagagcctggaagaaatgtgggatattccggggctgcaggaacgtctgaagaacgatttcgacctcgatttgccaattgccgagtggctggataaagaaccagaactgcatgaagagacgctgcgtgagcgcattctggcgcagtccatcgaagtgtatcagcgtaaagaagaagtggttggtgctgagatgatgcgtcacttcgagaaaggcgtcatgctgcaaacgcttgactccctgtggaaagagcacctggcagcgatggactatctgcgtcagggtatccacctgcgtggctacgcacagaaagatccgaagcaggaatacaaacgtgaaagcttctccatgtttgcagcgatgctggagagcttgaaatatgaagttatcagtacgctgagcaaagttcaggtacgtatgcctgaagaggttgaggagctggaacaacagcgtcgtatggaagccgagcgtttagcgcaaatgcagcagcttagccatcaggatgacgactctgcagccgcagctgcactggcggcgcaaaccggagagcgcaaagtaggacgtaacgatccttgcccgtgcggttctggtaaaaaatacaagcagtgccatggccgcctgcaataaaagctaactgttgaagtaaaaggcgcaggattctgcgccttttttataggtttaagacaatgaaaaagctgcaaattgcggtaggtattattcgcaacgagaacaatgaaatctttataacgcgtcgcgcagcagatgcgcacatggcgaataaactggagtttcccggcggtaaaattgaaatgggtgaaacgccggaacaggcggtggtgcgtgaacttcaggaagaagtcgggattaccccccaacattttagcctatttgaaaaactggaatatgaattcccggacaggcatataacactgtggttttggctggtcgaacgctgggaaggggagccgtggggtaaagaagggcaacccggtgagtggatgagcctggtcggtcttaatgccgatgattttccgccagccaatgaaccggtaattgcgaagcttaaacgtctgtaagtcagataaggcgttttcgccgcatccgacattcgcacacgatgcctgatgcgacgctggcgcgtcttatcaggcctaaagggatttctaactcattgataaatttgtttttgtaggtcggataaggcgttcacgccgcatccgacatttgcacaagatgcctgatgcgacgctgtccgcgtcttatcaggcctacgtgcggcatcagacaaatgtcactgctttggttcttcgctccagtcatcgctttcggaaagatcgccactgctggggattcgtttttcttcagcagcccattctccgaggtcgatcagctgacaacgtttggagcaaaatggccgaaacgggctgatttcaccccacaccaccgttttcccgcaggttgggcaattcaccgtaatagtttcactcatttttactccttagcaacaggccagttcgaaatccagacgttccggtacctgtccgttttcagtgtccagcggcataaaacgaatggcaaaacggctcttatgtccggaaatttgcggataaagctgactatcgaggctcagattcaggcgcagcaagtcggcatcgccaccgttatcctgataaaaaccattcaggctggtttgtttacggaagggggcgctctggcgaattaaatccagcaccatggtaagtgcctgggtgagcgggttcaggctggcaatccaggtttctacctggctgtcgcgctgcgcctggggtagatgcagccaaatgtgcaatgtaggtaaatcaaagctgcaacagccgcctgggatgctcagtcgctgacgcaccagagcaatcaaacgatcttcacgcagaaattgcccgatacgcggcgcggaaattaatacgctccccgccgcttttaactgctgaattaatgcttcaatacggctctggtccacgccaggcacgccaatccaggtctggagtttacgttgctgccggtcaagttctttcaacagctcagtgcggacttcgccgcgctcgaaaacatccagtaattcactgacattacggaagaaatgcagcgcgccagcgtggtcaacgatgggtaaattaacggtgagttgctgaatcaaaaactcaatgcgcagccatgtacgcattttttcatttagtggatgttcaaaaaggacctgggtctgcattacggtttttcctgactgacaaactggctcgcaagctgcaaatagtgtgcgtgcaggcgggcaacatcgcttgcgatagcatccggtgcgccgttattatcaatgacgtcatctgccacggcaaggcgggcttcgcgcgttgcctgagcagcaaggatttgttcgacatgctcgcgagttacatcatcgcgctgcatggtgcgcttaagttgcgtttctgggctgacatccaccacaagcactcgattcgcttttttatacagactgttttctaccagcaatggcacaacccacagtacatagggggaagtagcttgctggatctggtgttgcgtctcttgctgaatcagcggatgcagcagggcgttaagccagtttttctcttccgggttggcgaagatccgctcgcgcaaggcccggcgctgcaatgttccatcagcagcaatcatgttagcgccaaagtgatcagcaatggcatgtagcgcaggtgcacctggttcaaccacctgacgcgcaataatatcggcatcaatgacgttaattccgagatcagcaaacgcattggcaacggtactcttgccactgccaatgcctcccgttaaggcaactatatacctcataatttatattcccgggaattcatcatgattatcaaaacgttaaaaatgagtgcacgaaagcgaaattgatgaaacgttcgctcactatttaccaggtaaatttatgggattgtagcgtaaaaaaagacaatttcgcagtcttgcgccgcattgattagtgcgtatgatagcgtcactggagttgcgctcttacccttatagccattaaccccaggaatccgcacatgcgtattgaagaagatctgaagttaggttttaaagacgttctcatccgccctaaacgctccactcttaaaagccgttccgatgttgaactggaacgtcaattcaccttcaaacatagtggtcagagctggtccggcgtgccgattatcgccgcaaatatggacaccgtaggcacattttctatggcctctgcgctggcttcttttgatattttgactgctgtgcataaacactattctgtcgaagagtggcaagcgtttatcaacaattcttccgctgatgtgctgaaacatgtgatggtttctaccggtacgtctgatgcggatttcgaaaaaactaaacagattctcgacctgaacccggcattaaacttcgtttgtattgacgtggcgaatggttattccgaacacttcgtgcagttcgttgcgaaagcgcgtgaagcgtggccgaccaaaaccatttgtgctggtaacgtagtgactggtgaaatgtgtgaggagcttatcctcagtggtgccgatatcgttaaagttggcattggcccaggttctgtttgtacaactcgcgtcaaaacaggcgtcggttatccgcaactttctgcggtaatcgaatgtgccgatgctgcgcacggtctgggcggaatgatcgtcagcgatggtggctgcaccacgccgggcgatgtggcgaaagcctttggcggcggtgccgatttcgtcatgcttggcggcatgctggcgggccacgaagagagcggcggtcgcatcgttgaggagaacggcgagaaatttatgctgttctacggcatgagctccgagtctgcgatgaaacgtcacgttggcggcgttgcggaatatcgcgcagcagaaggtaaaaccgttaagctgccgctgcgaggcccggttgaaaataccgcgcgagatattttgggcggcctgcgtagtgcttgtacatacgttggggctagtcgcctgaaagagctgaccaagcgcaccacgtttattcgtgtgcaggaacaagaaaaccgcatcttcaacaacctgtaatctcccaacgctggcgtggagcaacacgccagcgttatcccatcccactcatcgcatcgcctaaatggaaaattggcagatacattgccaccaccagcgtaccaataattcctcccgttatgatcagcaacgccggttccagtaaggctgcgaggttatccgccagcgccattgtgttttcccgatgatgatgggcgaggttgtctaacatgagatccagagagccggatgcctctcctgttctcactaattgcaaacagagcgggctaaactcaccggtattttttagcgccagccagatgggttgaccgttactgatatcgtgctggatttgtgtcagaagttgcacccagtacgggcagcgcattgtttctctgacgctctctacgccctgtaaaaaagtaatgcctgcactttgtgtcagcgccagaatcgtaaagatctgcgtgagtttttgtccccgcatcagactacccataatcgggatgcgtaacagcaatttctgccgcactataagccaggtcggtcggcgcatcagcaacttattggctatcgccagcagaaagccgaacaacaccagcagccagctccattcgccactaaagtctgccagcgtcatgatcccctgcgttagtgccggtagtggggtgttgaaggtcttatagatagcggcaaactccggcagaacaaaatgcagcattgccacaaccaccatgattgccatcgctaaaatgatgatgggataacgtaacgcacttttcactttgtcggtcaactgacgctgggctttttgctgacgcgccagttcaaagcagcattcatccagcttaccggtcagttcacccgtgcggatcatcgcctgatagagcggcggaaatacctcactccagggtaataaggcattggaaaaagcaatgccctgttcgagatcgtgcgccaggctttgcagcaacgcttgccattgcttactgggatgctgttccgccagcagagccagcccttcagaaagcgttaaccctgctttgagtagcgtcgccagttgatgaatgacttccgcgcttttatctcctcgccactgcgcagaattgatggcgattcgcttcaggcttagtggggtaaccatctgttgctgtagtgccataagcagtaaagtacggctctctgcccatagcatcccatcttgcgcattgccgtcgccggttatgccatgccagcgccagagttgcttactcgccatgcggcatccccagtacgcggattaactcttcaaaggtggttaagccttgctctacggccaggcagccgttttcaaaaagcgtacgcatacccgcctgtcgtgcgtgcgtttccaggctttcaacgtcggtattagcggaaataagctgacgaatgaccggcgttatgggcagaacttcaaataaggccgtacgaccataaaaaccgtggtagcaatgtacacaaccgggtgcctgccagtggggcagcgggcttggccatacattgtctggaatgtggatgggctccccttgctgccggcgacaatgtgggcaaagtttgcgtaccagacgctgggctattaccagcgtaagcgcgctacttagcatccagcgggcgacccccatttgctgtaaacgtaccagcgtttcgcaggtggaattagtgtgtagggtagacaacaccaggtgaccagtttgcgccgctttaatagcgatctctgctgtttcgccatcgcggatctctccgatcatgatgacgtcaggatcctggcgcaataacgcacgcaaaacgccctgaaaggtgagtccggcacgcggatggatttgcgtctggtttagtccggctatggggatctcaactggatcttcgacgctacaaatattaatgtcagcggtattcagcttttgcagggcactataaagcgtgaccgttttgccgctgccggtagggccagttaccagcaccagtccctgtggttgttgcaaggcatgagcaaagtccgccagttgtaacggctgcattccaagcgtgttgacatccagtgcctgacccacctgctgtaacaaccttaataccaccttttcaccaccccgacatggtaaggtcgcaatacgaaaactgacggcgtttcctgccagttcgacagtgaattgcccgtcctgcggcaggcgatgttccgcaatatccaggtttcccagcacttttaatctggcggttaatgcgactccggcatccggactaacatccggtaaaggatgcaatacgccgtcgatacgcaagcggatgcggtaggcattgtccgctggttcgatatgaatatcagacgcgcgttgttccagcgcagattgtaacgttcgagttagcaactctgctttgggctgatgcttctcctgaacagctacgggcaatgtctgttgtgtgcgactggcgtgaccttccatttgttggcgcgtccagcaggtgatctcaatacgtttggtggtagcgaaatgcaatgcgtccagtagctcatggctaggtgcatcgactaccgcaacatgaaccacctcttcgctggcatccagcaagactccatgataacgcagacacagggcagtgagctgtggaatattcattgccgctccttagttggcgtcatcaaagcggaagacatcttcgcaggcttgctgcaatgcgctgtcactttgaatattgcagttgcgcgtccagccggtgacgccgtttgcgttatcccaacccggtgtcatgacgacgcttagcccattgagactttcttgcccggtcaggctcaccacgccctttgccacactcatggcactaacatagcgggtggtggtagggctgggaatgccattgctgccaccgtcgcaggtatctaatccaccatgttccagcgcgcacaactctacggcggtacggtaaggcacaaaggtttgtagcatgtcggtgagtgcggctttgcgcaggtagttttgataagcgggaataccaatggcgcttaaaatggcaatgatgccaataaccaccatcagttcgataagtgtaaaaccgcgttgcttgtccatctgtttcgctccttgatttggttggcgctactttggcaaacgccatcagcacaggcgaggggcaaaaaacgaaacgggaaagcagattccgaggttttttatttcgttgcagcgaaagacaagaaatttgcgaggcgttacgaagaaagttggggaaggggagattatccgcccgcgatggagcggataaatctgtcaactattagcgaaaacgcatactaaggtcgagtgcttgtacgtgtttagttagcgcaccgacggagataaagtccacgcccgtttcggcaaattcacgcagtgttttgtcagtgacgttgccagacacttccagtagcgccttgccgttggtgcgtttgacggcttcgcgcatctgttctgtttcgaagttatccagcatgatgatatcggctcctgctttcagggcttcatcaagttcttccagattctctacttcgacttctactggcgcatccgggtgcagccaggacgctttttcgaccgcctggcgcacactgccggaggcaataatatggttttctttgatcaggaaggcatcagaaagccccagacggtgattcgctccgccgccgcaaagtaccgcgtatttcagagcactacgcaggccgggtaaggttttgcgcgtatccaacaactgcgtgttggtgccttccagcaattcgacatagtggcgtaccttactggcaactccactaagggtttgcacaaaattaagcgcagtgcgttcgcccgttaacagcacgcgggatgggccttcaagttcgaacaaggattgattggcattgatgacatcgccgtcatccacatgccagattatggtgacatcgtcgcctgccagttgaataaacacctcttcaacccagcgtttgccgcaaaagacgccattctcgcgggtgatcaccgtggcatgagagcgagaattttccggtaaaagttttgccgtaatatcattgttggcatcgactgttccgcctaaatcttcccgcagcgcctgggccaccgcgccggggatatcgagattaatgcgttccagcagctcgtcacgtcgggtgtcagggttatagcggcgaggcggcatgttaaaactccagatagctaacgaatcataaggtagaaacatgctactctgaaccgggtattagcaccacatataaggagatcctgcatgttgttagaacaggggtggctggttggcgcgcgccgcgttcccagtccacattacgattgccgcccggatgacgaaacacccaccctgctggtggtgcacaatattagcctgccgccaggcgagtttggcggtccgtggatcgacgcattattcactggaactattgatccgcaggcacatcctttctttgctgagatcgcccatttgcgcgtctccgctcactgtttgattcgccgtgatggtgaaatagtccagtatgttcctttcgataaacgtgcatggcatgcgggagcctctcagtatcaggggcgcgaacgctgcaatgatttttctattgggattgagcttgaaggcaccgatacgctggcgtataccgatgcgcagtatcaacagcttgcggcggttacgcgggcactgattgattgctatccggatatcgctaaaaacatgacgggccattgtgatattgcgccggatcggaaaaccgatcccggtcctgcatttgattgggcacggtttcgtgtgctggtcagcaaggagacaacatgacgctatttacaaccttactggtgttaattttcgagcgcctgtttaagttgggcgagcactggcagcttgatcatcgtcttgaagcgttctttcggcgggtgaaacatttttctctcgggcgcacgttaggcatgaccattattgcgatgggcgtgacttttttactgttacgcgcattgcagggagtattgttcaacgttcccacgctactggtgtggctgctgattggtttgctgtgtattggcgcaggtaaagttcgtcttcattatcatgcttatctgacagctgctagtcgtaatgatagccatgcccgtgccacgatggctggcgaactcaccatgattcacggcgtcccggcaggctgcgacgaacgtgagtatttgcgtgagctgcaaaatgcattgctgtggattaactttcgtttttatcttgcaccgctgttctggctgattgtggggggaacctggggacccgttacgctgatggggtatgcgtttttgcgtgcatggcaatactggctggcgcgatatcagacgccgcatcatcgtttacagtccggcattgatgccgtgcttcatgtactggattgggtgccggttcgtcttgcgggtgtggtatatgccttgatcggtcatggtgagaaagcgttaccggcctggtttgctagcctgggtgatttccatactagccagtatcaggtgttaacgcgtctggcgcagttctctctggcgcgtgaaccgcatgtcgataaggtggagacgccgaaggcagcggttagtatggcgaagaaaaccagcttcgtggtcgtggtggtgattgcactactgacgatttacggggcgttggtgtaaagattattgccctcaccctgtacgggtgagggcgtagagagattaatgcgcttttacggctttggcggttttctctttaaacagatagccgatacctaacacgatcagccataccgggatcaggtatacgctaatcgccattcctggggtcatcagcataatcaccagtaccgccgccataaacagcaggcagatccagttacccagcggataaagcagagcagggaagcgagttaccacgccttgttcctgcttggcgcgacggaatttcatatgcgccaggctaatcatcgcccagttgattaccagtgcagataccaccagcgccattaacagtccgaaagcggactctggggcaaggtagttaatcagtacgcacaacgccgttaccagtgcagacaccagaatggtatttactggtacaccacgtttatcgacagacgccagcgcttttggcgcattaccctgttgtgccagaccaaacagcatacggctgttgcaatatacgcagctgttgtacacggagagcgccgcagtcagtaccacgatgttcagcgcattcgccacaaaggtatcgcctaactcgtggaagatcagcacaaacggactggtatcggcggtaacgcgggtccacggcatcagactgagcagaacggctaagctaccaatatagaaaatcaggatgcggtagataacctggttagttgctttcggtatactttgctccgggttatcagcttctgctgcggtgatccccaccagttccagaccaccgaagctgaacatgataatcgccatcatcatcaccagcccggtgaagccgtgcggcaggaaaccaccctgatcccacaggttgctaacggtcgcctgcgggccgccgttgccactgaatagcagccagccgccgaagatgatcatcgctaccaccgcgataactttgataatggcaaaccagaactccatctcgccaaacactttaacgttggtcaggttgatggcgttaatcaccacaaagaatacggcggcagaaacccaggtggggatttccggataccagaactgaatgtatttacccacggcagtcagctcagccatggcaactaaaacgtacagtacccagtagttccagccagaggcgaaaccggcaaaactgccccagtatttataagcaaagtggctaaaggagcctgcgacaggttcttcgaccaccatttcacccagctgacgcatgatcagaaaggcgataaaaccagcaatggcgtaacccaggataatccctggccctgcggactgtattacggaggcgctacccaggaataacccggtccctatcgcgccacccagcgcgataagctgaatatggcggtttttaaggccgcgctttagctgctcgccgtgctgttgaccttccatcatgaaacctcgtgcggtggttgtttttttgatctacgcagtgatgcgtgtgtaagtttgcaattccgtttgttgtattaatttgtttacatcaaagaagtttgaattgttacaaaaagacttccgtcagatcaagaataatggtatgcggcagcgaatgcacccgctttatgcatggttgaagatgagttgcttaaaaagaaaccgtttgtaaagctcagcctcaacccctctcaatatgtagaatgaatttaaattcgttttaattgaattaaaaatcacaaaattggtaagtgaatcggttcaattcggatttttatagtttaataatcgttaaaaaactcctttcctacgtaaagtctacatttgtgcatagttacaactttgaaacgttatatatgtcaagttgttaaaatgtgcacagtttcatgatttcaatcaaaacctgtatggacataaggtgaatactttgttactttagcgtcacagacatgaaattggtaagaccaattgacttcggcaagtggcttaagacaggaactcatggcctacagcaaaatccgccaaccaaaactctccgatgtgattgagcagcaactggagtttttgatcctcgaaggcactctccgcccgggcgaaaaactcccaccggaacgcgaactggcaaaacagtttgacgtctcccgtccctccttgcgtgaggcgattcaacgtctcgaagcgaagggcttgttgcttcgtcgccagggtggcggcacttttgtccagagcagcctatggcaaagcttcagcgatccgctggtggagctgctctccgaccatcctgagagtcagtatgacttgctcgaaacacgacacgccctggaaggtatcgccgcttattacgccgcgctgcgtagtaccgatgaagacaaggaacgcatccgtgaactccaccacgccatagagctggcgcagcagtctggcgatctggacgcggaaagtaacgccgtactccagtatcagattgccgtcaccgaagcggcccacaatgtggttctgcttcatctgctaaggtgtatggagccgatgttggcccagaatgtccgccagaacttcgaattgctctatagccgtcgcgagatgctgccgctggtgagtagtcaccgcacccgcatatttgaagcgattatggccggtaagccggaagaagcgcgcgaagcaagccatcgccatctggcctttatcgaagaaattttgctcgacagaagtcgtgaagagagccgccgtgagcgttctctgcgtcgtctggagcaacgaaagaattaatgatttttctggtaaaaattatccagaagatgttgtaaatcaagcgcatataaaagcgcggcaactaaacgtagaacctgtcttattgagctttccggcgagagttcaatgggacaggttccagaaaactcaacgttattagatagataaggaataacccatgagtgaacgtttcccaaatgacgtggatccgatcgaaactcgcgactggctccaggcgatcgaaagcgtcatccgtgaagaaggtgttgagcgtgctcagtatctgatcgaccaactgcttgctgaagcccgcaaaggcggtgtaaacgtagccgcaggcacaggtatcagcaactacatcaacaccatccccgttgaagaacaaccggagtatccgggtaatctggaactggaacgccgtattcgtagtgctatccgctggaacgccatcatgacggtgctgcgtgcgagcaaaaaagacctcgaactgggcggccatatggcgtccttccagtcttccgcaaccatttatgatgtgtgctttaaccacttcttccgtgcacgcaacgagcaggatggcggcgacctggtttacttccagggccacatctccccgggcgtgtacgctcgtgctttcctggaaggtcgtctgactcaggagcagctggataacttccgtcaggaagttcacggcaatggcctctcttcctatccgcacccgaaactgatgccggaattctggcagttcccgaccgtatctatgggtctgggtccgattggtgctatttaccaggctaaattcctgaaatatctggaacaccgtggcctgaaagatacctctaaacaaaccgtttacgcgttcctcggtgacggtgaaatggacgaaccggaatccaaaggtgcgatcaccatcgctacccgtgaaaaactggataacctggtcttcgttatcaactgtaacctgcagcgtcttgacggcccggtcaccggtaacggcaagatcatcaacgaactggaaggcatcttcgaaggtgctggctggaacgtgatcaaagtgatgtggggtagccgttgggatgaactgctgcgtaaggataccagcggtaaactgatccagctgatgaacgaaaccgttgacggcgactaccagaccttcaaaagcaaagatggtgcgtacgttcgtgaacacttcttcggtaaatatcctgaaaccgcagcactggttgcagactggactgacgagcagatctgggcactgaaccgtggtggtcacgatccgaagaaaatctacgctgcattcaagaaagcgcaggaaaccaaaggcaaagcgacagtaatccttgctcataccattaaaggttacggcatgggcgacgcggctgaaggtaaaaacatcgcgcaccaggttaagaaaatgaacatggacggtgtgcgtcatatccgcgaccgtttcaatgtgccggtgtctgatgcagatatcgaaaaactgccgtacatcaccttcccggaaggttctgaagagcatacctatctgcacgctcagcgtcagaaactgcacggttatctgccaagccgtcagccgaacttcaccgagaagcttgagctgccgagcctgcaagacttcggcgcgctgttggaagagcagagcaaagagatctctaccactatcgctttcgttcgtgctctgaacgtgatgctgaagaacaagagcatcaaagatcgtctggtaccgatcatcgccgacgaagcgcgtactttcggtatggaaggtctgttccgtcagattggtatttacagcccgaacggtcagcagtacaccccgcaggaccgcgagcaggttgcttactataaagaagacgagaaaggtcagattctgcaggaagggatcaacgagctgggcgcaggttgttcctggctggcagcggcgacctcttacagcaccaacaatctgccgatgatcccgttctacatctattacagcatgttcggcttccagcgtattggcgatctgtgctgggcggctggcgaccagcaagcgcgtggcttcctgatcggcggtacttccggtcgtaccaccctgaacggcgaaggtctgcagcacgaagatggtcacagccacattcagagcctgactatcccgaactgtatctcttacgacccggcttacgcttacgaagttgctgtcatcatgcatgacggtctggagcgtatgtacggtgaaaaacaagagaacgtttactactacatcactacgctgaacgaaaactaccacatgccggcaatgccggaaggtgctgaggaaggtatccgtaaaggtatctacaaactcgaaactattgaaggtagcaaaggtaaagttcagctgctcggctccggttctatcctgcgtcacgtccgtgaagcagctgagatcctggcgaaagattacggcgtaggttctgacgtttatagcgtgacctccttcaccgagctggcgcgtgatggtcaggattgtgaacgctggaacatgctgcacccgctggaaactccgcgcgttccgtatatcgctcaggtgatgaacgacgctccggcagtggcatctaccgactatatgaaactgttcgctgagcaggtccgtacttacgtaccggctgacgactaccgcgtactgggtactgatggcttcggtcgttccgacagccgtgagaacctgcgtcaccacttcgaagttgatgcttcttatgtcgtggttgcggcgctgggcgaactggctaaacgtggcgaaatcgataagaaagtggttgctgacgcaatcgccaaattcaacatcgatgcagataaagttaacccgcgtctggcgtaagaggtaaaagaataatggctatcgaaatcaaagtaccggacatcggggctgatgaagttgaaatcaccgagatcctggtcaaagtgggcgacaaagttgaagccgaacagagcctgatcaccgtagaaggcgacaaagcctctatggaagttccgtctccgcaggcgggtatcgttaaagagatcaaagtctctgttggcgataaaacccagaccggcgcactgattatgattttcgattccgccgacggtgcagcagacgctgcacctgctcaggcagaagagaagaaagaagcagctccggcagcagcaccagcggctgcggcggcaaaagacgttaacgttccggatatcggcagcgacgaagttgaagtgaccgaaatcctggtgaaagttggcgataaagttgaagctgaacagagcctgatcaccgtagaaggcgacaaggcttctatggaagttccggctccgtttgctggcaccgtgaaagagatcaaagtgaacgtgggtgacaaagtgtctaccggcagcctgattatggtcttcgaagtcgcgggtgaagcaggcgcggcagctccggccgctaaacaggaagcagctccggcagcggcccctgcaccagcggctggcgtgaaagaagttaacgttccggatatcggcggtgacgaagttgaagtgactgaagtgatggtgaaagtgggcgacaaagttgccgctgaacagagtctgatcaccgtagaaggcgacaaagcttctatggaagttccggcgccgtttgcaggcgtcgtgaaggaactgaaagtcaacgttggcgataaagtgaaaactggcagcctgattatgatcttcgaagttgaaggcgcagcgcctgcggcagctcctgcgaaacaggaagcggcagcgccggcaccggcagcaaaagctgaagccccggcagcagcaccagctgcgaaagcggaaggcaaatctgaatttgctgaaaacgacgcttatgttcacgcgactccgctgatccgccgtctggcacgcgagtttggtgttaaccttgcgaaagtgaagggcactggccgtaaaggtcgtatcctgcgcgaagacgttcaggcttacgtgaaagaagctatcaaacgtgcagaagcagctccggcagcgactggcggtggtatccctggcatgctgccgtggccgaaggtggacttcagcaagtttggtgaaatcgaagaagtggaactgggccgcatccagaaaatctctggtgcgaacctgagccgtaactgggtaatgatcccgcatgttactcacttcgacaaaaccgatatcaccgagttggaagcgttccgtaaacagcagaacgaagaagcggcgaaacgtaagctggatgtgaagatcaccccggttgtcttcatcatgaaagccgttgctgcagctcttgagcagatgcctcgcttcaatagtagcctgagcgaagacggtcagcgtctgaccctgaagaaatacatcaacatcggtgtggcggtggataccccgaacggtctggttgttccggtattcaaagacgtcaacaagaaaggcatcatcgagctgtctcgcgagctgatgactatttctaagaaagcgcgtgacggtaagctgactgcgggcgaaatgcagggcggttgcttcaccatctccagcatcggcggcctgggtactacccacttcgcgccgattgtgaacgcgccggaagtggctatcctcggcgtttccaagtccgcgatggagccggtgtggaatggtaaagagttcgtgccgcgtctgatgctgccgatttctctctccttcgaccaccgcgtgatcgacggtgctgatggtgcccgtttcattaccatcattaacaacacgctgtctgacattcgccgtctggtgatgtaagtaaaagagccggcccaacggccggcttttttctggtaatctcatgaatgtattgaggttattagcgaatagacaaatcggttgccgtttgttgtttaaaaattgttaacaattttgtaaaataccgacggatagaacgacccggtggtggttagggtattacttcacataccctatggatttctgggtgcagcaaggtagcaagcgccagaatccccaggagcttacataagtaagtgactggggtgagggcgtgaagctaacgccgctgcggcctgaaagacgacgggtatgaccgccggagataaatatatagaggtcatgatgagtactgaaatcaaaactcaggtcgtggtacttggggcaggccccgcaggttactccgctgccttccgttgcgctgatttaggtctggaaaccgtaatcgtagaacgttacaacacccttggcggtgtttgcctgaacgtcggctgtatcccttctaaagcactgctgcacgtagcaaaagttatcgaagaagccaaagcgctggctgaacacggtatcgtcttcggcgaaccgaaaaccgatatcgacaagattcgtacctggaaagagaaagtgatcaatcagctgaccggtggtctggctggtatggcgaaaggccgcaaagtcaaagtggtcaacggtctgggtaaattcaccggggctaacaccctggaagttgaaggtgagaacggcaaaaccgtgatcaacttcgacaacgcgatcattgcagcgggttctcgcccgatccaactgccgtttattccgcatgaagatccgcgtatctgggactccactgacgcgctggaactgaaagaagtaccagaacgcctgctggtaatgggtggcggtatcatcggtctggaaatgggcaccgtttaccacgcgctgggtagtcagattgacgtggttgaaatgttcgaccaggttatcccggcagctgacaaagacatcgttaaagtcttcaccaagcgtatcagcaagaaattcaacctgatgctggaaaccaaagttaccgccgttgaagcgaaagaagacggcatttatgtgacgatggaaggcaaaaaagcacccgctgaaccgcagcgttacgacgccgtgctggtagcgattggtcgtgtgccgaacggtaaaaacctcgacgcaggcaaagcaggcgtggaagttgacgaccgtggtttcatccgcgttgacaaacagctgcgtaccaacgtaccgcacatctttgctatcggcgatatcgtcggtcaaccgatgctggcacacaaaggtgttcacgaaggtcacgttgccgctgaagttatcgccggtaagaaacactacttcgatccgaaagttatcccgtccatcgcctataccgaaccagaagttgcatgggtgggtctgactgagaaagaagcgaaagagaaaggcatcagctatgaaaccgccaccttcccgtgggctgcttctggtcgtgctatcgcttccgactgcgcagacggtatgaccaagctgattttcgacaaagaatctcaccgtgtgatcggtggtgcgattgtcggtactaacggcggcgagctgctgggtgaaatcggcctggcaatcgaaatgggttgtgatgctgaagacatcgcactgaccatccacgcgcacccgactctgcacgagtctgtgggcctggcggcagaagtgttcgaaggtagcattaccgacctgccgaacccgaaagcgaagaagaagtaatttttcgtttgccggaacatccggcaattaaaaaagcggctaaccacgccgctttttttacgtctgcaatttacctttccagtcttcttgctccacgttcagagagacgttcgcatactgcactccgttgctcgttattcagcctgacagtatggttactgtcgtttagacgttgtgggcggctctcctgaactttctcccgaaaaacctgacgttgttcaggacttgcgctttgaacacgctggcgggcgttatcacgttgctgttgattcagtgggcgctgctgtactttttccttaaacacctggcgctgctctggacttgcggactgaatacgctcacgcgctgcgtctcttcgctgctggttctgcgggttagtctgcattttctcgcgaaccgcctggcgctgctcagggctggcggactgaatgcgctcacgcgctgcctctcttcgctgctggatcttcgggttagtctgcattctctcgcgaactgcctggcgctgctcagggctggcggactgataacgctgacgagcggcgtccttttgttgctgggtcagtggttggcgacggctgaagtcgtggaagtcgtcatagctcccatagtgttcagcttcattaaaccgctgtgccgctgcctgacgttgggtatctcgtgtaatgactggtgcggcgtgtgttcgttgctgaaactgatttgctgccgcctgacgctggctgtcgcgcgttggggcaggtaattgcgtggcgctcattccgccgttgacatcggtttgatgaaaccgctttgccatatcctgatcatgatagggcacaccattacggtagtttggattgtgccgccatgccatattcttatcagtaagatgctcaccggtgatacggttgaaattgttgacgtcgatattgatgttgtcgccgttgtgttgccagccattaccgtcacgatgaccgccatcgtggtgatgataatcatcattgtcatgatgatgatggtcatgatcgtcgtcgtcccagtcgatgctgctgaatagtgcgtacgtggtagcaacgcccatgctatagccgaatccgcgtacaaagctgtcaacaaacggttctccggctggtggtggcagataaaccggcggatacgcagtattggcccagttcccgtaaaccacggttgggttgtagttgggaatatagaccacatcaggattggcgggctcaatggaaatgacggttgttgccggctctgtaatgacggggttggcagttaaaactgtattggatggtatgacgggtgccgtgactgtctgttttaccggtacagctttcttcgttgtggtaataactttctgttcggtactactcttcaggctgccggtttgttgcgccagttgccgcaatcgctgtacgctgtccatcacgtcctgcggctgggccagaaaagcatcgcccaggttttgcacccattgcgggttttcgcccatcaatgccatcaattgtggaaaggccaccagacttttaacgctggcgtcccacggctggtcagataccgcctgaatagcagcatcgccttgtttaagtggattatcgtggctccattgcactgcttgagcaacgtttgtcggataggtacttgccatcagcacctggctaagtagggcgtcgggatacagcgcgacgggcgcgacccattgatctatttgtgcagtgctgaatgcggatttgacgacggcgggtgttacgggaggtgcggaaaccgttgcaggaaacgtaaccgcggcagcgtcagacacagccagttgtgtgctttgcggttccacaggcgcttccactgtgcggctttttatatatagcccggtagaggcggcacaaagcccggcactgcaaattagcgccagcacatggggtttaaacggcaaagtcattttcataattcggatctcaaggaaatcgcaatggtcggcgaactgccacccgcaggtgctgtgaatccgagtataaagaggcggtagtttaaattttgactaatcttgggattcgttgagaaaggtgattatcaccatgcgaattaacgaagtttttacggagggaaacaatctctagaccatccttaacgattcagccacttttttatgttgcttttttgtaaacagattaacacctcgtcaaaatcctgctattctgcccgttgcggtactgggcatttaccctacaaactgctgtctcacaggagcgtgaagagaatcgcctgccgcactatgacaatgagagcgaggagaaccgtcgtgctagaagaataccgtaagcacgtagctgagcgtgccgctgaggggattgcgcccaaacccctggatgcaaaccaaatggccgcacttgtagagctgctgaaaaacccgcccgcgggcgaagaagaattcctgttagatctgttaaccaaccgtgttcccccaggcgtcgatgaagccgcctatgtcaaagcaggcttcctggctgctatcgcgaaaggcgaagccaaatcccctctgctgactccggaaaaagccatcgaactgctgggcaccatgcagggtggttacaacattcatccgctgatcgacgcgctggatgatgccaaactggcacctattgctgccaaagcactttctcacacgctgctgatgttcgataacttctatgacgtagaagagaaagcgaaagcaggcaacgaatatgcgaagcaggttatgcagtcctgggcggatgccgaatggttcctgaatcgcccggcgctggctgaaaaactgaccgttactgtcttcaaagtcactggcgaaactaacaccgatgacctttctccggcaccggatgcgtggagtcgcccggatatcccactgcacgcgctggcgatgctgaaaaacgcccgtgaaggtattgagccagaccagcctggtgttgttggtccgatcaagcaaatcgaagctctgcaacagaaaggtttcccgctggcgtacgtcggtgacgttgtgggtacgggttctagccgtaaatccgccactaactccgttctgtggtttatgggcgatgatattccacatgtgccgaacaaacgcggcggtggtttgtgcctcggcggtaaaattgcacccatcttctttaacacgatggaagacgcgggtgcactgccaatcgaagtcgacgtctctaacctgaacatgggcgacgtgattgacgtttacccgtacaaaggtgaagtgcgtaaccacgaaaccggcgaactgctggcgaccttcgaactgaaaaccgacgtgctgattgatgaagtgcgtgctggtggccgtattccgctgattatcgggcgtggcctgaccaccaaagcgcgtgaagcacttggtctgccgcacagtgatgtgttccgtcaggcgaaagatgtcgctgagagcgatcgcggcttcagcctggcgcaaaaaatggtaggccgtgcctgtggcgtgaaaggcattcgtccgggcgcgtactgtgaaccgaaaatgacttctgtaggttcccaggacaccaccggcccgatgacccgtgatgaactgaaagacctggcgtgcctgggcttcagcgctgacctggtgatgcagtctttctgccacaccgcggcgtatccgaagccagttgacgtgaacacgcaccacacgctgccggacttcattatgaaccgtggcggtgtgagcctgcgtccgggtgacggcgtcattcactcctggctgaaccgtatgctgctgccggataccgtcggtaccggtggtgactcccatacccgtttcccgatcggtatctctttcccggcgggttctggtctggtggcgtttgctgccgcaactggcgtaatgccgcttgatatgccggaatccgttctggtgcgcttcaaaggcaaaatgcagccgggcatcaccctgcgcgatctggtacacgctattccgctgtatgcgatcaaacaaggtctgctgaccgttgagaagaaaggcaagaaaaacatcttctctggccgcatcctggaaattgaaggtctgccggatctgaaagttgagcaggcctttgagctaaccgatgcgtccgccgagcgttctgccgctggttgtaccatcaagctgaacaaagaaccgatcatcgaatacctgaactctaacatcgtcctgctgaagtggatgatcgcggaaggttacggcgatcgtcgtaccctggaacgtcgtattcagggcatggaaaaatggctggcgaatcctgagctgctggaagccgatgcagatgcggaatacgcggcagtgatcgacatcgatctggcggatattaaagagccaatcctgtgtgctccgaacgacccggatgacgcgcgtccgctgtctgcggtacagggtgagaagatcgacgaagtgtttatcggttcctgcatgaccaacatcggtcacttccgtgctgcgggtaaactgctggatgcgcataaaggtcagttgccgacccgcctgtgggtggcaccgccaacccgtatggacgccgcacagttgaccgaagaaggctactacagcgtcttcggtaagagtggtgcgcgtatcgagatccctggctgttccctgtgtatgggtaaccaggcgcgtgtggcggacggtgcaacggtggtttccacctctacccgtaacttcccgaaccgtctgggtactggcgcgaatgtcttcctggcttctgcggaactggcggctgttgcggcgctgattggcaaactgccgacgccggaagagtaccagacctacgtggcgcaggtagataaaacagccgttgatacttaccgttatctgaacttcaaccagctttctcagtacaccgagaaagccgatggggtgattttccagactgcggtttaaaaagtcagcgcacgcgctgcgcataaacgacacaatgcccggtgaatgagattcccgggcatttttttatttctaaaccatcgccgttccgctgtttttctccggtaaggctgcgataattacatcaatggcgcaatgcgatttcggtgcattgccgggagcagaggaacacactatggattacgaatttctgcgcgatattaccggagtggtaaaggtgcgtatgtccatggggcatgaagtggtcgggcactggtttaatgaagaggtgaaagaaaacctggccttgcttgatgaagtggaacaagcagcgcacgcactgaaaggtagcgaacggtcctggcaacgggcagggcatgaatacaccctgtggatggacggtgaagaggtgatggttcgcgccaatcaactggaattcgctggcgatgaaatggaagaggggatgaactactacgacgaagaaagcctgagcctatgcggcgttgaggattttctgcaggtcgtggcggcttaccgcaatttcgtgcagcagaagtaaataaatctggcggagcctgggagctccgccagagccgttaaacagctggcatattgcgcccgtaataaatctcgcgcatttctttccacagcgcagcggtaatttcctggcgctcgctgtcggttaagtcttccggtttggtgtggaacatgtagtgcttaaggtcgaactctttaagcaacatcttggtatggaagatattttcctgatagacgttcacatccaccatgtcatacagcgccttcatatcgtcagacataaagttctgaatgctattaatctcatggtcgataaagtgcttcataccgttaatgtcgcgggtaaaaccgcgcacgcgataatcaatggttacgatatcggactcaagctggtggatcaggtaattcagcgccttcagcggagaaatcacgccgcaggtagagacttcaatatcggcgcggaaggtacataaaccgccttcaggatgactttccgggtaggtatgtacgcaaatatgacttttatcaagatgggcaacgaccgtttctggcagtgggccggggtgttctgttttgtcgatgagtttcgggtcaaccggttcttcactcaccagaatagtgacgctggcaccctgtggttcgtaatcctggcgggcgatgttaagaatattagccccgataatggaacaggtttcactcaggatttcggtcagacggttggcattatagagttcatcgatataagcaatataaccgtcgcgctcttcggcagttttggcgtagcagatatcgtaaatacaaaaactcagacttttggtcagattattaaagccatgcagtttcagttttttcaatttcttatcttctccttaggacggctgactagccagtgcgtcttgcagatactgaggtaaggcaaaagctgccgtatggattgccggattgtaataacggcatttcaggccagaggcgagaaaacgcgcctgaataatttcggtactgagatggcgtaaggcgtcgttatctgtcgcccatgcaaaagtcatgataccgccgtaataggtcgggatcgccgcctgataaaagccaacgtcgctgaagtaatggctgagtttgcgatggctgtcgatggcttcttcctgctgtaaaaagcagacgccgttttgtgcgacgaagataccgccaggattcaggcaacgtttgcagccttcataaaatgcgctagtgaaaaggctttcgccgggaccgataggatcggtgcagtcggagataatgacatcaaaggtctggctggtttgattaacgaaattgacgccatcgtcgatcaccagcttaaagcgcggatcgtcgtagctaccggcgttatggttgggtagatactgacggcagaagcttacgacacccgcatcgatttccaccatcgtgatactctcaacgtttttatgtcgggttacttcacgcagcatggcaccgtcgccgccgccgataatcagcacatgtttcgcgtgaccatgggccagtagcggaacatgggtcatcatctcatgatagataaactcgtcgcgctcggtggtttgtactacgccatccagcgccattacgcgaccaaatgcagcgttctcaaaaatgatcagatcctggtgatcggtcttttcatgatacagaacgttatctaccgcaaagtactgcccaaactggtcgtgtagcgtttcatgccactgttttttttcggccatgggttgatacctcctttgttaacacccgtaaaaaaagggcgcaacataatagctaacattgaccgcggatgcacggtcaatatttctacaaaaaggtatcagggattatttgacgtaggcaagcaggcttaaggaatcgcgggccagggctttgcattttttagcgacgggaatgccaatgccgctgagatcgcggtagctgtcttcaccgagggctttcatgtcgaaggtgtcgtaattactgaggtcccactggttttgctgagcgaaaaagaccagtgcgcgacgaatttgcccgttaggtaagttctggtaaccacaatcgttcttcagaaagacaaaaactgccgttaaatcggccatatcttcggcttcagactcgctgagcgcgtaactgtttgcgcagacggccatcaggctgccgaataacactgttctgaaaaacgtcttcattgcttctaccaggggcttaaagaagataaacgttagcacactgcgagcgaggcgacgaccattattgtcgattaaattgtgtctgcggcttgaccttcccgtaaggggaaggactatgctcaacgtttgattttgtttcgcctgcttaagaataaggaaataactatgcaacgtcgtgatttcttaaaatattccgtcgcgctgggtgtggctagcgctttgccgctgtggagccgcgcagtatttgcggcagaacgcccaacgttaccgatccctgatttgctcacgaccgatgcccgtaatcgcattcagttaactattggcgcaggccagtccacctttggcgggaaaactgcaactacctggggctataacggcaatctgctggggccggcggtgaaattacagcgcggcaaagcggtaacggttgatatctacaaccaactgacggaagagacaacgttgcactggcacgggctggaagtaccgggtgaagtcgacggcggcccgcagggaattattccgccaggtggcaagcgcagcgtgacgttgaacgttgatcaacctgccgctacctgctggttccatccgcatcagcacggcaaaaccgggcgacaggtggcgatggggctggctgggctggtggtgattgaagatgacgagatcctgaaattaatgctgccaaaacagtggggtatcgatgatgttccggtgatcgttcaggataagaaatttagcgccgacgggcagattgattatcaactggatgtgatgaccgccgccgtgggctggtttggcgatacgttgctgaccaacggtgcaatctacccgcaacacgctgccccgcgtggttggctgcgcctgcgtttgctcaatggctgtaatgcccgtagcctcaatttcgccaccagcgacaatcgcccgctgtatgtgattgccagcgacggtggtctgctacctgaaccagtgaaggtgagcgaactgccggtgctgatgggcgagcgttttgaagtgctggtggaggttaacgataacaaaccctttgacctggtgacgctgccggtcagccagatggggatggcgattgcgccgtttgataagcctcatccggtaatgcggattcagccgattgctattagtgcctccggtgctttgccagacacattaagtagcctgcctgcgttacctagcctggaagggctgacggtacgcaagctgcaactctctatggacccgatgctcgatatgatggggatgcagatgctaatggagaaatatggcgatcaggcgatggccgggatggatcacagccagatgatgggccatatggggcacggcaatatgaatcatatgaaccacggcgggaagttcgatttccaccatgccaacaaaatcaacggtcaggcgtttgatatgaacaagccgatgtttgcggcggcgaaagggcaatacgaacgttgggttatctctggcgtgggcgacatgatgctgcatccgttccatatccacggcacgcagttccgtatcttgagtgaaaatggcaaaccgccagcggctcatcgcgcgggctggaaagataccgttaaggtagaaggtaatgtcagcgaagtgctggtgaagtttaatcacgatgcaccgaaagaacatgcttatatggcgcactgccatctgctggagcatgaagatacggggatgatgttagggtttacggtataaaaagaccgtattcggaaatatgcccggatctctccgggcattaaactgatgacaaacgcaaatctgcctgatgcgctacgcttatcaggcctacgctagctgtgcaatccattgattttgcacaattttgtaggctggataaggcgttcacgccgcatccggcatgaacaacgcgcacgttgtcagcaatctgagcaagtcttacttcacatcatccggcagcgcataagccacaatatagtcgcccatcttcgtaccaaaactaccgtgaccgcctgcggagatcaccacatactgcttaccattcacttcataggtcattggcgtagcctgaccacccgctggtaaacgaccctgccacagtttttcaccgttgctcatgttgtaagcgcgcaggtagttatctgccgtagcggcgataaacagcacgttacccgccgtggagattggcccgcccagcatcggcatacccatattgaacggcaccggaaccggcatcgggaacggcatactgtcctgcggcgtaccaatacgtttcttccacaccacttcattagttttcagatccagcgcgctgatataaccccatgctggctgtttacatggcagaccaaatggactgaggaacgggttgagcgtgacaccatacggtacaccgtactgtggctgaatgccggattccgtacccgtgcctttggcatctttcggctgctccatcgggttgccaggaccacgcgggatcagtttgctaacaaacggcagtgccattgggttggcaatcgccacttcacgatttggatcaacggaaatcccgccccattcgaacatccccaggttacccgggaagaccagcgtaccctgttcagatggcggggtgaaaatgccttcatagcgcatctggtggaacatcacgcggcacaccagttggtcaaacatggtggctccccacatatccgcaccgctcaaatctttcgtcggacggaagctcagttcagaaaacggttgagttggggttacgtaatcgcctttcgctgcaccttggggaaccggtttttccggtgccggaaccaccagttcgccattacgacgatcgagcacaaaaatgttgccggttttcgccggagcgtaaataactggcactttctgaccattaacggtgatgtccgccagcgtcggctgtgccggaagatccatgtcccacaggtcgtggtgaacggtctggtagctccacgccagtttcccggtagtggcattcagcgccagaatgctgctggcataacgttcctgttccggtgtgcggttaccgccccagatatccggcgtggtcacgcccatcggcagatagaccagatccagcttcgcgtcataggccgctggtgcccaggagtttgggctgttaaaggtaaaggtgtgttcgtcagacgggattgcgttcggatctttcgcgccgggatcaaaagcccacagcagctccccggtgttgacatcaaaaccacggatcacgccagacgtttcgcgggtactgaagttatcggtaacactaccggccatcacgatggttttatcggtgataatcggtgggctagtcggttcatacagacccggtttggtgtctggcatattgctttgcagattgagcacgcctttattggcgaaggtttcgcacagtttgccgttttcagcgttaatcgcaatcagtcgaccatcattgaccggaagaatgatacgacgcgggcaatccgccatcacttccgggctagcggtttctgctttggcttcatgataagagacaccacggcaggttacgtgctggaaagactcgttggttttcagctcaggatcgtaatgccatttctctttgccgctggcggcatcaagcgcaaacaggcgctggtgagcggtacacaggtaaagggtgtcgcccactttaatcggcgtcacttcattggtgatttcacccggatcgttcggctgcttcacatcgccagtacggaacacccaggcttctttcagattatggacgttatcggcgttaatttgtttcagcgggctaaagcgttgaccttcctgattacgaccataggcaggccagtcctgatcggctacgggggagatagcttcagcaggtgtggcatcggcgcttaaggtgccgttgatctcctgcggatcgttaaatccggcccaggtcaggataccaccgctaatcagcagtgcgaccaccagtgcggcaactgcgccgctggcaggaatgaccaggcgacgccagacaaacggcaggatcagccagatgccgaagaagaccagaatgtcgctgcgcggagtcagcgcccagaagtcgaaaccaacttcccagacgccccaaatcatggtgccgagcagcagggctgcgtatagccaaagcgcggcgcgtttactgcgccacagcatccaggcgacgccgagcatcacaaggccagcgatagggtagtaccaggagccgccaatcgcgaccagccagcctccgccaatgagtagatacagcccgcaaagcgctgcaaaaagggctgttagcgtgacgagtaatcgtcggctgcctgtattgttaattgccataaagagacaccatttcaattcattaatattttagtagcaattaattataggttttaacatgtgtgatcgtcatcacaattcgagctttattaacagattccgcgaatgaatagttttactggtatactgcgtgtcttgcgctttgttgcggtgccaaaacctgcccgtgcgaagtgatttgtttttaaatcatatggttagagatatgaaacatactgtagaagtaatgatccccgaagcggagattaaagcgcgtatcgccgaactgggtcgtcagattactgagcgttacaaagacagcggcagcgatatggtgctggtgggtctgctgcgtggcagttttatgtttatggcggacctgtgccgtgaagttcaggtatctcatgaagtcgactttatgaccgcctccagctacggtagcggcatgtccaccacccgtgatgtgaaaatcctcaaagatctggatgaagatatccgtggcaaggacgtgctgattgttgaagatatcatcgacagcgggaatacactgagcaaagtgcgtgagatcttaagcctgcgcgaaccgaagagcctggcgatttgtacgctgctggataaaccgtcccgtcgtgaagtgaacgtcccggtagaatttatcggtttcagcatcccggatgagtttgtggtgggttacggcattgattacgcacagcgttaccgtcatctgccgtatatcggcaaagtgattctgctggacgagtaagtgtgaagttgccggatgtgttgcatccggcatggcatttttatttgtggttggcgtgtttcagcttgaggttggaaatcccgtgacggtaacgttgctcaagggtttcgcggttggtggcggtaacatccagatcacgcagcaagccgtcgtgaatgccgtaggcccagccgtgaatggtaactttctgcccgcgtttccacgcactttgcataatggtggagtggcccaggttatacacctgttccatgacgttcagttcacacaaggtatccagacggcgctcttgcggcatttcgccgagcaaactgctatgtttgaaccagatatcgcggatatgcagcagccagttgttgataagccccagttccgggttttcaactgcggcttgtacgccgccgcaaccgtagtggccacagataataatgtgttcaacttcgagtacatccactgcatactgaaccacggaaaggcagttcaggtcagtgtgaatgaccaggttagcaacattacggtgaacaaagagttcgcccggctcaagaccggttaaacgttctgcaggaacgcgactgtcggaacatccaatccatagaaagcgcggtttttgcgcttgtgccagtttctcaaaaaacccgggatcctcttccaccagcattttactccatagtgcattgttgctgatgagtgtatctatgtctttcatggaggttaacgacctgtaaccaaataattacgtttggctaatatagggcaactccgggacgatttaaaccacagataaagtgtaagaacgtaaggtaagtaaaaatttatgaccattgcactggaacttcaacagcttaaaaaaacctatccaggcggcgttcaggcgcttcgtgggatagatttgcaggtcgaagcgggtgatttttatgcgcttctcgggccgaacggggccgggaaaagcaccactatcggtattatcagctctctggtaaataaaacctccgggcgggtcagcgtatttggttacgatctcgagaaggatgtcgtgaacgctaaacgtcagttgggactggtgccgcaggaatttaacttcaacccgtttgaaaccgtgcagcaaattgtggtgaatcaggcagggtactacggcgtggagcgcaaagaagcgtacatccgcagcgaaaagtatcttaaacaactcgatctatggggaaaacgcaacgaacgtgcgcgtatgttatctggcgggatgaagcgccgtttaatgattgcccgtgcgttaatgcatgaacctaaactactgattctcgacgaaccgaccgcaggcgtggatattgaacttcgccgcagtatgtggggctttttgaaggatttaaacgacaaaggcaccaccatcattctcaccacacactacctggaagaagcagaaatgctgtgccgcaatatcggcattattcaacacggtgagctggtggaaaataccagcatgaaggcgctgctggcgaagctgaaaagcgaaacctttattctcgatctcgcaccgaaaagcccgttaccgaagctcgatggctatcagtatcgactggtcgataccgcgacgctggaagttgaagtgctgcgtgagcaggggatcaacagcgtatttacgcagttaagtgagcagggcattcaggtattaagtatgcgtaacaaagctaaccgtctggaagagctgtttgttagtctggttaatgaaaaacaaggagatcgcgcatgatgcatctttactgggtggcgctaaaaagcatctgggcgaaagagatccatcgctttatgcgtatctgggtgcagacgctggtgccgccagtcatcaccatgaccctttactttattatcttcggtaacctgattggtagccgtattggcgatatgcatggcttcagctatatgcagttcatcgtaccggggctgatcatgatgagcgtgatcaccaatgcctacgccaacgttgcgagtagtttttttggtgccaagttccagcgtaatattgaagagctgctggtagcgccggttccgactcacgtcattattgccggatatgtcggcggtggcgtggcgcgtggtctgtttgttggcattctggtgacggcaattagtctgttttttgtgccatttcaggtgcatagctgggtattcgttgccttaacgctggtgctcacggcggtgttgttctcccttgcgggtttgctgaacggtgtgtttgccaaaacgttcgatgacatcagcctggtgccaacctttgtgttaacgccactcacgtatttgggcggggtcttttacagtctgactttgttgccgccgttctggcaagggctgagccacctgaacccaatcgtttatatgatcagtggtttccgctacggcttcctcggtatcaatgatgttccgctggtcactacctttggcgtactggtggtctttattgtggcgttttatttgatctgttggagcctgatccaacgtggacgtggtttgcgtagctaaggctatttcctctcctctggatttgggggagaggagttttgacggctatcaccctttatcaacaatggtcagggtagactgattttcggctaaggaggaaggcgatgttaggttgggtaattacctgtcacgatgaccgggcgcaagagatactggatgcgctggagaaaaaacatggggcacttcttcagtgccgggccgtgaatttctggcgcggattaagctctaatatgctcagccgcatgatgtgcgatgctctgcatgaagcggactctggtgagggtgtcatcttcttaaccgatatagccggagcgccaccgtatcgcgtggctagtttattaagccacaaacactcccgttgcgaagtgatttctggtgtcacgttaccgttaattgaacagatgatggcttgccgtgaaaccatgaccagtagtgagtttcgcgagcgtattgtcgaactgggtgcgccggaggtgagtagtctttggcaccaacaacaaaaaaatccgcctttcgtcctcaaacataatttgtatgagtattaacccgcgattctgatggcgcttttgctacaataaaagcgttgtttcaccctcggttattttttcatgtacaaacaagctgttattctcctgctgatgctgtttaccgcaagtgtcagtgccgcgttacctgcccgttatatgcaaaccatcgaaaatgctgcggtctgggcgcaaattggtgacaagatggtgaccgtggggaatattcgggccggacaaatcattgccgtggagcccactgccgcaagttattacgcatttaattttggctttggcaaaggttttatcgataaaggtcatctcgagccggttcaggggcgacaaaaagttgaagacggtttgggcgacctcaacaagccgctgagtaatcagaacttagttacctggaaagatacgccggtctataacgcgccgagtgcgggaagtgcgccatttggggtactggcggacaatttgcgctacccgattttgcataaactgaaagacaggttaaatcaaacctggtatcagatccgtattggcgatcgactggcctatatcagcgcactggatgcccaacccgataatggcctgagcgtgctaacctatcaccatattctgcgcgacgaagaaaacacccgttttcgccatactagcacgaccacaagcgtacgcgctttcaataaccagatggcctggctgcgtgacaggggatacgcgacactgagcatggtgcagctggaaggctacgtgaagaataagatcaatctccctgcgcgagcggtggtgattacctttgatgatggcctcaagagcgtgagccgctatgcgtatcctgtgttgaaacaatatggcatgaaggcgacggcgtttattgttaccagtcgcatcaaacgtcacccgcagaagtggaacccaaaaagcctgcaatttatgagcgtttctgagcttaacgaaattcgcgatgtatttgatttccagagtcatacccattttttgcatcgggtagatggttatcgccgacccatattactgagccgtagtgagcacaatattctgtttgattttgcacgtagtcgccgcgctctggcgcaatttaatccgcatgtctggtatcttagctatccgtttggcggatttaatgacaacgccgtgaaggcagcaaacgatgccggatttcacctggcggtgacaaccatgaaaggcaaagtaaaaccgggggataatccgttgttactaaaacgactttatatcttaagaacggatagcctggagacgatgagccggctggtgagtaaccagccgcagggataacaatcaagcaacctgtaccggaatcgctttcgcggtacgtttcatttcattgtcgccttcaaaataggcgacgttgggtcgccaggtgcgagcttcttcatctggcatggtaacgaagctggcgatgatgacaatatcgccgacactggcgcagtgggccgccgcaccgttaacagaaataattctgctaccgcgttctgccgcgatggcataagtggagaaacgcttgccgttggtgacattccagatatcaatggcttcgttttcgagaataccggctgcgtcaagaaaatcctggtcaatggcgcaagaaccttcatagtgcaggtccgcatgagtcactttcacgcggtggagtttgccctgcagcatcgtgcgaatcataacttctacctttctaccctgtcgttaacgaagcaggcgatgcctgctttgaggaaattctcacgcagtattgcccgatttttgtttagtgtctactcatctgacggcatttgcgtcagcagtttgcgtaccgcgccgaagcgtgccatgtatcgcctgtaacgaattgatatttctctgaacgctgctcggtaaacaataaagaggtggctgacgatagcgcgccttgactggatactgccttcacgcaaagccacacggaagacagggaagatggatgcaccgagtaccacaccgcatgacgcggtatttaaacaatttttaatgcatgcggagacggctcgcgactttctggagatacatttgccagtggaattacgcgaactttgtgacctcaacacgcttcatttagagagcgggagtttcattgaagagagcctgaaaggacacagcacggacgtgctctattccgtgcaaatgcagggcaatcccggttatctgcatgttgtgattgaacaccaaagcaagccggataagaaaatggcctttcgcatgatgcgttattctatagccgccatgcaccggcatctggaggctgaccacgataagctgccgctggtggtgccgatactgttttatcagggcgaggccacaccttatccgctaagtatgtgctggtttgatatgttttacagcccggagctggcgcgacgcgtctataacagtcctttcccgctggtggatatcaccatcacaccggatgacgaaatcatgcaacatcggcggattgcgattctcgaactactgcaaaaacatattcgccagcgcgacttaatgttattgcttgagcaactggtcacgctgatcgacgaagggtacactagcggaagtcagttagttgccatgcaaaactatatgctgcaacgcggtcatactgaacaagcggatttgttttacggtgtgttgagagacagggaaacgggaggggagtctatgatgacgctggcgcagtggtttgaagagaaagggattgagaaggggattcagcagggaagacaggaagtaagtcaggaattcgcccagcgtcttctgagtaaaggaatgtctcgggaagacgttgcagagatggcaaatttacctcttgctgagattgataaggtaattaaccttatttaagttacctgtgttatgacagatgacgtggggtaaattaataactggcgccatcagccgtagcgccagttaagtattacgccagctcgaccattttgttgtcgatcaggcgagcatcgccaagccaggcggctaccagaattactgcccgtttgctggtttcagaaacttccagcaatgtgtcggcatcgcgaatctgaatatcatcggcgcggaagcctttttcattcagttcttgccccgcaatggtaataatttcatcgagatcccgttccccagcctgcaatttgtcagcaatgctacttaaaactttgtacagaccaggcgcaattttgcgttgttccgccgtcagataaccgttacgggaacttagcgccagaccgtctttggcgcgcataattggcacaccgacaatctcaatatcgaagcccatatcggcaaccattttgcggatcagcgccagttgctgaaaatctttttcaccgaagcaggcgatgtccggctggaccaggttgaacagcttgctgacaatagtgctaacgccgcgaaaatgtcccggacggctggcaccttccagcatggtgctaaggccaggaacgtcaacgtaagtgtgggtttcagtaccgttcgggtagatctcttttacgctaggggcgaaaactaaatccactttacgtttgtttagcttctcgcagtcctcctgcaaggtccgtggataacgagccagatcttccgggcggtcgaactgcatcgggttaacgaaaatactgacgacgaccacatcggcgcgggctttggcttcgtcgaccagcttcatatggccatcgtgcaggttacccatggtaggcaccagcgccacgcgcttgccttccatacgcaggcggcgaatttgctgacgcagcagcggcagggtttcgataattaacacaacgtgactccttaatggaaactgtgttcttcgcccggataaacgccggactccacttcagccatatactgccgcacagccgcgcggatgtcgcccgtttcggcgaggaaatttttagcgaatttaggaatgtgaccgccggtaataccaaaggcgtcgtgcatcacgaggatctgcccgtcagtgacgttgcctgcgccaatgccaataaccgggatcgccagtgcttcggtaatacgttttgccagttcaaccggcacgcattccagcaccagcagctgtgccccagcagcttctaaggctaatgcatcgctgagcagttgatcgcccgcttcatcgccgcgcccctgaactttgtagccaccgaaaatattcacactctgtggtgttaaacctaagtgaccacatacaggaacggcacgttcggtcagcatttgtacggtttctaccagccactcaccgccttcaattttgaccatgttagcaccggcacgcataaccgttgcggcgttttcgaaggcttgttccggcgtggcatacgccataaacggcaggtcagccagcagcaggcagtttggtgcgccgcgacgtacggcggcagtgtggtaggcgatatcggcaacggtaactggcagggtggagtcgtgcccctgaaccgtcatgcccaggctatcgcccaccagcatgacgttaagcccttcatcagcaaagagtttggcgaagctatagtcataagcggtgatggtcgcgaaacgttttttttcctgtttgtacttctgcagtaaggagatggtggtcggtttcataacgtatcctgataaattgatgttgtgctgtctggcattttatcagtcacattggtgggggcaatgatttatccgtagcagcactgccagaaggtgacagtgctgctacgttatcagggataggttacctggaaagtactggtggctttaaattcgccgggttcgatagcaatattcccgtcttgctttaatgttgcctggaaatgaagaggctgacttgtgccgttaccttgattagggtaaaccccatcggaggtgtcatcttcggtttcataatctatataaacagaattcgtatcattaggttttaatgtcattagcggatttttactggttgctaaaccttcaatgagtacgccaacgcctttggcggcagtgcttccagtaagcgtattaccaagcagttgtgtgttttgagtacctacttttccagtgacgagttttgtttcaatattacgcacacgaatacaattctgaaggctgatatcaaagggaacaggactagcgccatttttaattgtcccagagctatattctcccattctaaccgtactaccattgacacttggcccggtaagtatggaggtaaaacatgttggtaaggttaatttgacattattcagtgtgaaattgacataaatgtggttgctgtgatctacaacttttgtaccaggactgtaggccttaaagctataaaggtaattactactactggataactggacttgctgattaagtgtaggatcgaaattagtatctgtataaaattcaacagttatgttgtgtactataccaccaatagcccaaaacttatcgtagtcgtctgctttgttgcaacccttagtttgtagatcgctgtctgtgacggaaaagaaaaattcttggttggaaggatctccgatatagattcctgggctttgaatgtcagttattgtatcgtatgcagaccagaccctacttattaacatggtgtaatacagaccaggaacagatgtattaaatagtttatgtccgccataatctttaccactatagaccatggcattttcaatagttattggaccaggattcgctctgccagatgtattgcagtaaagaataccaccaccggtacctgtatccaggtaactccagtacatttttaccccagtcgggccgagctgcgtgggtttataaaaaaccaagttgcttgctgtacttgtgtaattaaaggtcatctgtgcggcagtggaggggcctcgatagttatcaactcctgcattatttcccacaataaaacttgtatatgcactgactgtattacaacaagaatacagtgctaaaaaaagaatgtacctgaagatagtcttcatttttactccaatgtttctttattgttatggtttgcgctgtttttgtttgttattcgtagtaaatatccactaacacatggctcataagttgaccagatgtaacactcaatgcaggatcgattttttgcattcgggtgctaaatttccaggaactaccattcatgtcatcgctcattactggataaacggaacgagatccgccactagcattaagaacattgaatgtattcgcgctatcctgagtagaaaatataactactcctacattacttgctccactgctaatttcattagcaaatatttgcctagagccagcagccatgacaccgctaagggctctaaaatcaatatgtaactgatttagcacatcgccagttccctgtaatgcacagtcggatacagtgatagtgaactcttttccacctggttgataactttcaggagtaacattaccactaaaatatcccaccccaacgacgccaagatcaatattaccctggttactgattccgcttttgcaggtgctgttttttacattggcaacaaggtcaatatcctgtccagcaatggctggacaggcgatgcaaaacagtaaactcagaaacagaattattctcttcatcagcttacgttgagtgggatgcatatatagttcctgaatctgtaagtctgttagttataggttactgtaaatgtggctggtgcagaaaacttacccgcagtgacattgtttacggttttatttttttccacgaccaggcgtgcactcatcggataataaacgaccgcattggctgcagtggagattgttacctcttgacttgctggtgttacacagctaaattgtgttgcactccctgttgccggagttacagtgctccagacttcaacggcgacagcacttgctttatctgcggctgtggaaccatttgcaaaccccgcaccgtcattagcagttccctcgcatgtggctcgcttggttaattttatttgcgcttttttattggggatacccgcacagtctttgaatttgagtttgaatgtttttactttggtcttggcattgatttcagaaatatatacatcaccaaaatcaacaacagaaatgtcctgatcagagtcatttactaatgtagcggtacaagtacccatttctacagtagtaataacggtcagtccaatactgtctgttgccgcataagagagtacgctgaacaaactggcagccaaaacgacactgctggataatccataacgtaaatttttaaatgtcatcataattatccttcttattgatagatgaaattaaacgtcgccagtgcacgaaaattccccggtacgccttgccctgcatctgtttcacgtagcgcaacggtcatttcaagacccttatcgggctgcatctcgtctgtgctccagcgtatcttttccgcactgttaggtttaaggaaagtggcatcatcagtagtccgttttttgaaacccataccgatattacttgtcgtgctagaactatcaccagactgcggtataataagcttaggactgctactacttgcatttccggtcagagtggtatcaatccaactgatgccactgctgcacccactggcaaccagtttaaaatcagcctgagattctgtcgttttattcgcgatcttatccagacccatcttagggattctcaatgtgtagttattattgccatcattcgtgacgttattaccagtaagtgtgatgttacaggttgtcgctttgacagtggctgtaaactctacattaatatccgttgcaaatacactgggacttaataatattcccatcagtatcactattttatgtggcgttgtttttatcatttgacgtcccttgtagttactgaatctgacaccgaattccattcagaataatagattgtgctattttttctgcttctgggctttgttgataatgcgcaagacaacttacgggtttactttgttcgagccatttaatgctgatatttccctgctgctcaataccacgaacaaatgcttgtccaccctgtccaacattaccaatgacattgccttgctcatcataaatatctgcagcaaatggaatatttttaccatcacttcgtgtgatgttcataatggcactttgcccttgcacggtttcaaaatcagcaaagacgacactaccctgacgcggtacagctactgcactggtactttttaattcaacatcgttctcaagatcgttgatatccagcgcgatacggttttcatgataaggagaaagagcgctggtgacaccataaccccatcgatcgatagtactgttgccataatttattcgcgctccttgagcacctggagcctgaactaccgccagtgtatcggagtcgctaaaactatcattactgaaagtcagtccaccgctatgcaatacaaaaccaccgtcggtgctgagagaaacttgacggctgttatcgctatttgcagaaatactacctgccagcgttccccatggactctcatagctggcataacccccaacataactcaaatctttgctggctttattcatcgtatagccagtattcacgctataactgacgcgagcgttatcgctatagccactgctgctaacgttgagttggttattacccttaaagtcactgcttatttgagtatcaatactctggaaaccactagtacgttgttcagtgccaagtaatttttcaattggaatggtgaaactaagataaacgctatcgtcagtgtcgccgtcttcattccaactacgctgggcactgacactgtagctgccccaggatgtactgttactgtagccaatagagtaattgctacgattttgtccggaagcccagtaatcggaccaacttccggaaagataaaaactaccgtaatcttttttctcaaatttcaacggttggttaatactgaccgtaacctgatttttcatgcgactgtaattacgcatggatttcggttcaagatcttgttcgggatgtttcacttcatcaattagagttagtgcatcattaagaccaaggtaattctgtgtgctatagcgataggccgcgatattcagactagtacttgtttcttcgaataacttgttccaggaaacacgataactttgcccctggtatgttttatcatccgggatacgaacattggaatgagtcacatcgaaagaaaatgcaccaacactagtattcagaccaagacctaacaaaccagcggtatagttattatcggttatctgaataccggtataacccgtcagatagttattcaggccgtagtagtagcttgcttgaaataaattaggctcatcctgaatatcatcttttaagacctgaccgccgctaatatcccaacgtccaacgccagggcgtaacatttgaacaacggaactgaaaggttggctgaatgtccgcttactgccatcggattcttcgatggtaacaataagatcgctgccgtacccactcggactcagatcatcaatgacgaaagcgcctggcggcaccgtcgtttcataaatcttatagccaccttgcgtaatagtgactttggcgttggtattggcaacgccatgaatgataggcgcaaagctggctaaagtcggaggcaacatgcggctgtcactgtataaacgaatgcctcggatactgacggaatcaaaggtttcgcccgtcgtataagactcaccaagaatgagttgagaacgcaggctggcgatatcacgctgaacataccgattcttaaaatcataattactgccagaatcggtcatccagttgtagttgccgctggcacgcagtcgccatgcacctaaattcatcccaccgttaaatgcagcataaatgctttcattttttcgaccaggggtttcactatgatatccgttgaggttgtaactcaacatggccgcattaatgccgttttcccataagcttggatcaacatagttttggtaatttttcattacccaggcttgaggaacgtctatatccagacgttgatcgttaacgtcataacgaacagaagcctgagggataatttccgtcaaattgaggcaattgccgagcgtttcatccctggcaagcagaacggctttttcgttatttatatcgggagaattaatatgaaactgcaataaattctttaatgtgatacaagcctgggcgttcttttttccttcaattgcgacaaatgtaatactttggttaatgattggttggtcgtttacataaacactgacgtcgtaaacacccggtatagcggggttaccttcactgtaccggctgagatcaatattagatgcattctgccccatcaggaaggtatggtcatattcaacgagttcagcactgaaagcagtattgcaatacagcagcgcgcaaaacgtggcgatacgggtcagatgatgataatttttagtatattctatagtcacgctatgcttcctgcggaattatatccttgcctgattacagcctggcattaccttcaattgcgccaccaaagtcattaatggcgtaaaaatgcacttttgcagaattcgctttgccattaaggccattgactttcatgacctcatcactaaatggtgcaatcattttcacatcaatcggatagcgtttaccgctagcttctaaatcaccactgctaaaagagacgtagtaaggggttggattggtcactcgtaaactcgccttaccttcactaccactccagaaccacttcagggctaacggggcttcagagggatttcccttcaatccatccgggcgatagaaaagttttatacgtgtgcgaaatgccagttgcagcaggctttgattcgcgaccttttctgcatctggttttggtggaacttccagtacgttaaaccagaacacgctctctctgtctttaggcagactggtgctggctgtgtacattaatttgattgtttgcccacgtttggcatcaatacggcttactggcggcgtagcagtaaaagggactgtaatactgccaggctcagcgttgtcatcgccagtatctaaccaactctggacaagcaacgggttattccctttattttccagacgtacgttgacacttttttgatcgcttttatatattacgcgagtaccgctaatgacaatgtccgcaatagagctactactaaaagccatacaggttacgaagcataaagctgttgtatgtttggtgttaaaaaacataaaccatccctgatagagttaattaaaacagggaataatataaaatagaaattattattccctgtatattcattcaatcaatttaactggtgaatacttactgataagtaatggtgtatgcagtgttagtttttacataaccagcagttgctgtttggtctgcgacggcacgaacgtaagacgctttaaaatcataaacagcagattttgtcgttgcatccagggctttagtatacacatcgccagggttgttaatttgaacctgtttgatagtggaaccatcaatattgtgtagagcgatattaacgccgtcagatgggttgttaatagacatgtcgttgttcaaagtccctttgctgttaccaaagaaaacagaaccgaaggtcattttagccgtgctacctggattcggatttgctttgctgcagtcaacggtgatgctgaaaggtttagctttagcgccaacggtgtcattcagtacgccagcatcgatttcaccaacggttgcggtttgcagcaggatcagaccatccttgttaccgccgtcaacgcgggtttcacaggtgttatcaacaaccagaccactgatatttaactgaccgccgtccatatcagcagaagcagtacctgcaaccatcgccagcataagaccagacagggcaaaacctaattttttagacataaaaatcctttaataaaattccattagtcagactacatgtttgaagaatgactattcatgacacaaataggagaaacaaatgttagatattaatgagcaatgatatttgttacccaaatttacaaccattgttcattaggtcgcctattgtgcactttagaagcttttgaacaaattaaatttacttaattcaaaattaagtaaaaataagttcacaagtgcaattggttagggtatggagatgggattgatatttatttataggaagttatattatttccgcaaagagatgtttaaactaaaatcgtaattaaggaaagagatgagatatgattttcagaaaatatttatattcgcaatataaataaattaccatttgtttaatttgtcaaatgctcttgtatgtaagatttgacgcaacatctccccatcaggaaacaccaactccggcgcgatttcaaacagcggccacagcataaatccacgattcttcatatcgtagtgcggaacggtcaggcgttcagtatttatcacttcattaccaaacagcatgatgtcgagatccagcgtgcgtggtccccagcgttcagctttgcggacgcgaccttgctgcaattcaatacgctgtgtgtgattgagtagctcttcaggtgcaagagaggtttccagcgccacggctgcgtttaagtaatcgggttgatcttgcggccccagcggtggggtgcggtaaaagctagaaacggtaagaatgtggctttcagggatatcgcctaatgctttcagggcagcattgacctgctccagcggagaggccagattgctgcctatggcaatatacgccactgtcatgcggtaccctcacgacgtggtgcgcgtttgcgtggacgacgagtacgacgacgcggactcggttcttcatccagctcgttgagcatccctttttggtctggtggcgcggaaacctggaactcaccccaccatttcaccagacgctgcagttcagcgttacgctcaacttcagctcgcaaggccaacaggtcataagccgcacggaacttaggatgctccagcagtttccatgcgcgtttaccctgacgacgggacatacgcaactgcaactgccagatatcgcgggttaatgtcgtcagacgtttcgggattgccagactacggcaggcttcgtccagcacgtcgttcatcgccagcgcgaaagcgtcgtgataggtcaggccgctttcctgggcgatcttctgtgccgtctccagcagtgggtaccagaacatggcggcaaacaggaacgccgggttcacgcgcatatcgttatggatacgcgtatcggtattcttcagcacctgttcaatgatccgctccatcgggctgtcgccattttccgtgaagtagcgggtaatggtcgggaacagcggctggaacagatgatattcacacaacagcttataggtttcgtaaccgtagcccgcttgtagcagtttaaggctttcttcaaacaggcgtgccggtgggatatcgttcagcagggtagcgaggcgagggatcggttctgcggtttccgggctgatgcgcatacccaatttggcggcaaaacgtaccgcgcgcagcatacgtaccggatcttcacggtagcgcgtttccgggttaccaatcagacggataacgccgtccttcagatccttcatgccgccaacgtaatcacggacggtaaaatccgctacgctgtaatacaggctgttgatagtgaaatcgcggcgctgggcgtcttcttcgatggagccgaaaatgttgtcgcgcagcaacatgccgttttgcccgcgttgggaggtcgtgcggtcgctgacgttaccttcgtggtgtccacggaaggtcgcaacttcgataatctccgggccaaacattacatgagccagacggaaacggcgacccaccaggcggcagttacggaacagtttgcgcacctgctcaggcgtggcgttagtggttacgtcaaaatctttcggctttttgccaagtaacaggtcgcgcacgccgccgccaaccagccaggcttcgtatcccgctttattgagcctgtacattaccttcagggcattttcactgatatctttgcgggaaatagcatgctgctcacgcgggatcaccgtcacctgtggacgggcgactgcctgttcagcctcgctttcctcgcggcttagcaccttgcggcaaaaattagcgactcgggtaaaaatagtacacctcggtagtgtcaaacatcattcaggacaaaaaaatagcggctaatcatagctcagcaactcgcattactgaatgtactatttacaattgcgctctcgggcacggcggtaagccgccagtttttgacggcactctgaaggatttgctcgacgctgaaatcctgccagtgtgcttctgcctgctgccccagaaattgaagtgccgcgattagtaccgggcgtggatcgcctttcggcaacgcaggcgcatgattctgcttggaaagtttagcgccttgtggattaagcgccagcggcagatgaatgtaatctggcactttccagccaaaaagctggtacaggctgatttgccttactgttggttcaatcagatcagccccacgcactatttctgtaacgccctggaaatgatcatcaaccacaacagccaggttgtaggcgaacaacccatcacggcgatgaatgataaaatcttcccgtgccagtttttcgtcggcgtgaataatgccgcgcagctggtcagtaaattgcgtgaccggatgctgctggcggatacgcactgcggcgttgtctggtccatgatgcaacacccggcaatgaccgtcgtaaataccgccaatgctttgaatacgcgcacgcgtacaggtgcagtaataacttagtccttgttcatgtaaccaggcgagtgcttcacgataggcgtcgtgacgttggctttgccagagaacatcgccgtcccagtgcagaccgtaatgttccagctggcgcaggatagtttctgcggcaccgggaacttcacgaggcgggtcgatatcttctatgcgtaccagccagcgaccttgccgggcgcgagcctgcaaatagctgccgagcgcggcgatcagagagccaaaatgaagctcgccggaaggagagggggcgaagcggccaatatactgtgtgtctgtcatctctttgaacaaaaaataaggcgggagcatttcccgcctgtggtaaacgtgatggaacggctgtaattagccagccatctgtttttcgcgaatttcagccagcgttttgcagtcgatgcacagatcggctgtcgggcgcgcttccagacggcgaataccaatttcaacaccgcaggattcgcagtagccgaaatcttcgtcttccacttttttcagcgtcttctcgatctttttgatcagcttacgctcgcgatcgcggttacgcagttcgaggctgaactcttcttcctgggctgcacggtctaccgggtccgggaagttggctgcttcatcctgcatatgtgtaacggtgcgatcgacttcatccctgagttgattacgccatgcttccagaatacgacggaagtgcgccagctgggcttcattcatatactcttcgcccggcttctcctgatatggttccaccccagcgatggcgagaatactcagggagcttgttttacggttttgcccttcttgcatgttgcttctccttaacacgcactatcgatccccatgttcgggggaaaaatgaggccgctataaatagcagatgcttttccggatagcaattatctaaacgtaacacttgacaactgtgtgaggaaaagcgtatttgcgcacgcgaccagaatgtaaattaaccagttacttactttattacaatgtaaccggcagactttttttaagagccatgccttcagcagaaatttccgctttgtaagccagaatttctacccccctctgttgagcttcactcaatagttgcgcgtatttctcatcgatgtggcgcgcgggactaaaccgtgtaatggcactatgcagcacggcgaaaaagataaccgcacgctggccttcagccgctacgctcatcaactcccgaaggtgtttctgacctcgttcagtgaccgcatcgggaaaatatccctgttcgttctccgctaacgtaacgcttttcacttcaatatagcagtctggacggctatccgcctgcaacataaagtcaatacggctgcgttctgcgccgtattttacttcgcttttcaggctgctatagccactcagttcactaatactttcattaaggatagcctctttcgtcaacctgttagcccaaagcgtgttgacgcaaataaatgcgccgctctggctttgagttaattcccaggtgtgtgggtatttccgtttggtgttgtcactagtgctataccagacggtatcgccaggcgttgcacaaccggtcatcgcacccgtattcgggcagtgtagcgttaattcgcgaccatcgggtgtgatcacatcggctaaaaaacgtttgtaacgctgaattagcgtcgcgcgctgtagagggggagaaaattccattgcgacaatccttgttattgcgttagcgcccagcgttttagcggcgtgtagcgtgtgcgtccacgggcaaagctggaggcgtaaagggtgaactccgtcaccgcatagctccagttaaaacctggcggcgggattgtcaccgcctcgctggcgtcgcgcaataaggtaatatgtggatgaaacggacgattgctttgaaaacaaccgctgcgggcagcctgactacggagcatattcgccagctggattaagccgcgtggcggctgacgcatccctaaccacaccacacggctacgcagccattgtccggcgtcatcaagcgtgagtgtgaaaccaggttgacgaatccgtccggctaaaagagaaagcgccttctctttctcggcgctcacttcgcctaaaaatgccagagtcagatgcaaattatcggcggcgaccggacgtcccgcctcaggtgggaagtgtgtggcgcgccaatggataatctgttcgcggatttctgcaggtaagtcgatagcaaagaacagacgttgcggttcagacatgtgaggcactcggttatgaattaccgcgatgctacaatgtggcgcgaagaatgttaaccctctggagcgttttgtgagcagcttgcccgttgctgccgtcttacctgaattacttaccgctctcgattgtgcgccgcaggtattattaagtgcgccgaccggggccgggaaaagtacctggctgccgctgcaactgctggcgcatcccggcattaacgggaaaattatcctgctggagccgcgtcgtctggcggcgcgtaacgtcgcgcaacggctggcggagctgcttaacgaaaagccaggcgataccgttggctaccggatgcgtgcgcaaaactgcgtcgggccgaatacccgcctggaagtggttaccgaaggcgtgctgacgcgcatgatccagcgtgacccggaactgagcggtgttggactggtgatccttgatgaatttcatgagcgcagcttgcaggcggatttggcgttggcgctgttactcgatgtgcaacaaggtctgcgtgatgaccttaaactgctgattatgagcgctaccctggacaacgaccgcttgcagcaaatgctgccagaagcgcctgtcgtcatcagtgaagggcgcagctttccggttgaacgccgttatttaccgctgcccgcgcatcagcgttttgacgatgccgttgcggtagccaccgctgaaatgctgcgtcaggaaagcggaagtttactgttatttttacctggcgtcggagaaattcagcgtgtgcaggaacaactggctagccgcatcggcagtgatgtattgctctgcccgctgtatggcgcgttgagcctgaacgatcagcgaaaagcgatcctcccggcaccgcaagggatgcgcaaagtggtgctggcgaccaatattgctgaaaccagtttaaccattgaaggtattcgtctggtggtggattgtgcccaggagcgtgtggcgcgttttgatccgcgcacggggcttacgcgactgattactcaacgcgttagccaggcatccatgacgcagcgtgccgggcgcgccgggcgtctggagccgggtatcagcctgcatttaatcgccaaagaacaagcagaacgcgccgcggcgcaaagtgaaccggagatcttacaaagcgatctttccggtttgctgatggaattactgcaatggggatgcagcgatccggcgcagatgagctggctggatcaaccgccagtagtgaatctactggccgcgaaacgtctgttacaaatgctgggggcactggagggtgaacggcttagtgcgcaagggcaaaaaatggcagcgctgggtaacgatccgcgtttagcggcaatgctggttagcgcgaagaacgacgacgaagctgctaccgcggcaaaaattgccgccattctcgaagagccgccacggatgggcaatagtgacctgggcgtggcgtttagccgcaatcaaccagcctggcagcaacgtagtcagcaactgttaaaacgcttaaacgtacgtggcggtgaggcagacagtagccttatcgcgccgctacttgccggggcgtttgccgatcgcattgctcgtcgccgtgggcaagatggacgctatcaactggcaaacggcatgggagcgatgctcgatgccaacgacgcgctaagccgccacgaatggttgatcgcaccgttattattgcagggcagcgccagcccggatgcgcggattttactggcgctgctggtcgatattgatgagttagtacaacgctgcccgcagctggtacagcagtctgacactgtggagtgggatgacgcgcaaggtacgctgaaagcctggcgtcggctacaaatcggtcagttgacggtgaaagtgcagccgctggcgaaaccgagtgaagacgagttgcatcaggcgatgcttaatggcatccgtgataaaggtttaagcgtgctcaactggacggcggaagcggaacagctacgcttgcgtttgttatgcgccgcaaagtggttgccggaatatgactggccagcggttgatgatgaaagtttattggcagcgctggaaacgtggctgctgccacatatgactggcgtacatagtctacgcggcctgaaaagtctcgacatttatcaggcactacgcggattacttgattggggaatgcagcaacgtctggatagtgaattgcctgcgcattacactgtgccgacgggaagccggatcgccattcgttatcatgaagataacccgcccgcgctggcggtgagaatgcaagagatgtttggcgaggccaccaatccgacgatcgcccaggggcgcgtgccgctggtgctggagttgcttagtcctgcccaaaggccattacaaatcacacgagatttgagcgacttctggaaaggagcgtaccgtgaggtgcaaaaagagatgaaagggcgttatcccaaacatgtctggccggacgacccggcaaatactgcaccgacgcgacggacgaaaaagtatagctaaggttggttttctccctctccctgtgggagagggccggggtgagggcatcagcgcgcacgttcaccctcaccctaaccctctccctcaagggagaggggaccgatcgagcacaaattttgagagatatcttcttctgtcttgtaacagaagaacagaaaatcgggcttttgcgcctgaatattgcggagaaaaagcatggccgggaatgaccgcgagccaattggacgcaaagggaaaccgacgcgtccggtcaaacaaaaggtaagccgtcgtcgttacgaagatgacgatgattacgacgattatgatgactatgaggatgaagaaccgatgccgcgcaaaggtaagggcaaaggcaaagggcgtaagcctcgtggcaaacgcggctggctatggctactgctaaaactggctatcgtttttgccgtgctgatcgccatttacggcgtttatctcgatcaaaaaattcgtagccgtattgatggcaaggtctggcaactgcctgcggcagtttatggccgaatggtcaatcttgagccagacatgaccatcagcaagaacgagatggtgaagctgctggaggcgacccagtatcgtcaggtgagcaaaatgacccgtcctggcgaatttaccgtgcaggccaacagcattgagatgattcgccgtccgtttgatttcccggacagtaaagaaggacaggtgcgcgcgcgtctgacctttgatggcgatcatctggcgacgatcgtcaatatggagaacaaccgtcagttcggtttcttccgtcttgatccgcgtctgatcaccatgatctctagcccaaacggtgagcagcgtctgtttgtgccgcgcagtggtttcccggatttgctggtggatactttgctggcgacagaagaccgtcatttttacgagcatgatggaatcagtctctacagtatcggacgtgcggtgctggcaaacctgaccgccggacgcacggtacagggtgcgagtacgctgacgcaacagctggtgaaaaacctgttcctctccagcgagcgttcttactggcgtaaagcgaacgaagcttacatggcgctgatcatggacgcgcgttacagcaaagaccgtattcttgagctgtatatgaacgaggtgtatctcggtcagagcggcgacaacgaaatccgcggcttcccgctggcaagcttgtattactttggtcgcccggtagaagagctaagcctcgaccagcaggcgctgttagtcggtatggtgaaaggggcgtccatctacaacccgtggcgtaacccaaaactggcgctggagcgacgtaatctggtgctgcgtctgctgcaacagcaacagattattgatcaagaactctatgacatgttgagtgcccgtccgctgggggttcagccgcgcggtggggtgatctctcctcagccagcctttatgcaactggtgcgtcaggagctgcaggcaaaactgggcgataaggtaaaagatctctccggcgtgaagatcttcactacctttgacagcgtggcccaggacgcggcagaaaaagccgccgtggaaggcattccggcactgaagaaacagcgtaagttgagcgatcttgaaactgcgattgtggtcgtcgaccgctttagtggtgaagttcgtgcgatggtcggaggttctgagccgcagtttgcgggctacaaccgtgcgatgcaggcgcgtcgtagcattggttcccttgcaaaaccagcgacttatctgacggccttaagccagccgaaaatctatcgtctgaatacgtggattgcggatgcgccaattgcgctgcgtcagccgaatggccaggtctggagtccgcagaatgatgaccgtcgttatagcgaaagcggcagagtgatgctggtggatgcgttgacccgtagcatgaacgtgccgacggtaaatctggggatggcgctggggctgcctgcggttacggagacctggattaaactgggcgtaccgaaagatcagttgcatccggttccggcaatgctgctgggggcgttgaacttaacgccaatcgaagtggcgcaggcattccagaccatcgccagcggtggtaaccgtgcaccgctttctgcgctgcgtagcgtaatcgcggaagatggcaaagtgctgtatcagagcttcccgcaggcggaacgcgctgttccggcgcaggcggcgtatctgacactatggaccatgcagcaggtggtacaacgcggtacgggtcgtcagcttggggcgaaatacccgaacctgcatctggcagggaaaacagggactaccaacaataacgtagatacctggtttgcgggcattgacggcagcacggtgaccatcacctgggtcggccgtgataacaaccagccgaccaaactgtatggtgccagcggggcaatgagcatttatcagcgttatctggctaaccagacgccaacgccgctgaatcttgttccgccagaagatattgcagatatgggcgtggactacgacggcaactttgtttgcagcggtggcatgcgtatcttgccggtctggaccagcgatccgcaaagcctgtgccagcagagcgagatgcagcagcagccgagtggcaatccgtttgatcagtcttctcagccgcagcaacagccgcaacagcaacctgctcagcaagagcagaaagacagcgacggtgtagccggttggatcaaggatatgtttggtagtaattaacatctaagcgtgaaataccggatggcgagttgccatccggtaaaataacatcccatctaagatattaaccctttcttttcatctggttgtttattaacccttcaggaacgctcagattgcgtaccgcttgcctgtaagactcaatgtaagccgtgccaaaatatgatggctaggacgagctagaacccgccagcgtttcgaatattatcttatctttataataatcattctcgtttacgttatcattcactttacatcagagatataccattccatataacggccctgtacgcctggacggataaagcgtttacgcgacaacggatgcccgatgcgacgctggcgcgtcttatcgggcctacaaacggccccgaatcgtaggtcggataaggcgttcacgccgcatccgacaaaccatgctggatcacaacttcgcaaacacccgacgtgcagcatcgatggtgttattgatatcttccatgctgtgcgccacggacataaagcccgcttcaaacgcactcggtgccaggtaaacaccttcgtccagcatcatatggaagaaacgcttaaagcgttccacgtcacaggccatcacatcctgatagcacgtcacggactcggcgtcggtaaagaaaataccgaacatgccgccaacgtggttaacgaccagcggaattccggcttcttctgccgcttccagcagaccttctgccagacgtgttgtcagctcatccagcgtttcgtgaacgcccggctgcgcgacttcattcagacaggcgaaacccgctgccatcgcaatcgggttaccggaaagcgtacccgcctgatagaccggacccgtcggggccagcgcatccattacatcacgacgaccaccgaatgcgcctaccggcattccaccgccgatgattttgccgaggcaggttaaatctggcactacgccgtaataatcctgtgcgccagctagcgctacgcggaaaccggtcatcacttcatcgatgatcagcaacgcgccaaattcgtcgcacagcgcgcgcagacctggcaggaactctggcagcggcggaacacagttcatattgcctgccaccggctcgacgataatacaggcaatctcttgcgggtattgctcaaatgcggcgcgtacagaagccagatcattataagtacaggttaaggtatatttggcgaaatctgccggaacgcccgggctgtttggctggcctaacgtgagtgcgccagaaccggctttcaccagcaggcagtcagcgtgaccatggtaacacccttcaaatttaataattttgtcgcgaccggtaaaaccacgggccaggcggatggcgctcatggtcgcttcagtgccggagttcaccatgcgcaccatatccatggtcgggaccagttcggtcaccagttgcgccattttcacttccatttcggttggtgcaccaaagcttaaaccacgctcggcggcttcaatcacggcattgcggattgccggatggttatggcccagcaccatcggcccccaggaaccgacataatcgatataggctttgccatcaacatcgtacagataagcgccgtccgctttttcgataaacagtggagtgccgcccacgccagtaaaggcgcgaacaggggagttcacaccgccagggatcagctcgcgcgctgcgctgtaaagattttcagacttactcatggagggttcctgattcgtagaaaaagtgaatggctgctattctatgttattcataacaagttaaatactcgtcaaacatcaggctgcttgtactggtgcaatcctgatttcttagagtataaaagttttgtgcatttgaaacattacgctttgcaaaggattttcatggaacgtgcgagtaaaatgccgtcatcttatttgtatgaccaataagtgatcattggatgaaaactgatactccctctttagaaacaccgcaggccgcgcgcctgcgacgcagacaactgattcgccaacttcttgagcgcgataaaaccccgttagccattttgtttatggcggcagtcgtcggcacgcttgttgggctggcagcggttgcttttgacaaaggtgtcgcctggttgcagaaccaacgtatgggggcgctggtacatactgctgataattatccgcttctgttaaccgtcgcttttctctgtagcgcggtgctggcgatgtttggctactttttggtgcgcaaatacgcgccggaagcaggtggtagcgggatcccggaaattgaaggggcgctggaagatcaacgtcccgttcgctggtggcgtgtattgccggtgaagttctttggcgggctggggacactcggcggaggcatggtgttggggcgcgaagggccaaccgtgcagatcggcggtaacattggccgtatggtgcttgatattttccgcctgaaaggtgacgaagctcgccatacgctgctggcaaccggtgctgctgcggggctggctgcggcctttaacgcgccgctggcgggtattttgtttattatcgaagagatgcgtccgcagtttcgctatacgttaattagcattaaagcggtatttattggtgtcattatgagcaccattatgtaccggatttttaatcatgaagttgcgttgattgacgtcggtaaactttctgatgcgccgcttaatacgctgtggctttatctgatcctcggtattatttttggcattttcggccctatttttaataaatgggtgctggggatgcaggatttgctgcaccgtgtgcacggcggcaatattaccaaatgggtgctaatgggcggtgcgattggcggtctgtgtggattgctggggtttgtggcaccagcaacgagcggcggcggttttaacctgattcctatcgctaccgcggggaatttcagcatgggaatgctggtgtttatcttcgtcgcgcgggtcattaccaccttactctgcttctcttccggcgcgccgggcggtatttttgccccgatgctggcgctgggtactgtgctgggaaccgctttcggaatggttgccgttgagctgtttccgcaatatcaccttgaggcggggacgtttgctattgccggaatgggggcattactggcggcatctattcgcgcgccgttaacggggatcattctggttctggagatgaccgataactaccagctcattttgccaatgattattaccggtcttggcgcaacactattagcgcaatttaccggcgggaaaccgctatacagcgcgattcttgcgcgcacgctggcaaaacaggaagctgagcaactggcgcgaagcaaggccgcaagtgccagcgagaatacttgaacgaaataccagggtattagataatggcgattattattgggttagaatttgcccaattgccgatgtcgtttggagcaaaatatgagtgatgacgtagcactgccgctggagtttaccgacgcagcagccaacaaagttaaaagcctgatcgctgacgaagataacccgaatctgaaattacgcgtgtatatcaccggtggcggttgcagcggcttccagtatggtttcacctttgatgatcaggtgaacgaaggcgatatgaccatcgaaaaacagggcgttggcctggtggttgatccgatgagcctgcaatatctggtcggcggttccgttgattataccgaaggtctggaaggttctcgtttcatcgtgaccaacccgaacgcgaaaagcacctgcggttgcggttcttcctttagtatctaatctgttgttcatgtgccggataaactatccggcacatcttctctcttcaacgcccattctcatccagcgcaaacgtcggtagcttaagatgccaacgaatagccgccagccgaatcaatagcgtcacgaccatgcccatcatactggctgtttccagtggtacggaaaatgtgtaataagccgtagcgtggacaataccgccgataatacaggcagttgcgtagatttctgtacgtaaaatcatggggatttcgcgggccagaacatcacgaatgatcccgccgccaacgccagtaatgacgcccatacaaaccgcgattaacggaccggcttccgcattaaaggctttattcacgccaatgccgacaaacaccgccagaccaacggcgtccagcaccggcaacatccattttggtaagcgtcttggctggcgcaccagcacgatggtcagcatgctggtgaccattgcaacgaccagatcggtgggatctttcacccaaaataccgggccgtgatccagcgccatgtcgcgaattgtcccgccgcctactgcggttaccacgcccagtaccagaacaccaaaagggtccatacgcaattttccggctaacaaaacgccggagatggcaaataccgctgtgccgactatatccagccaatagacgagcattgttcaatccccactgagcacctgaaaaggtcaggcgttaatctacctgactaagcgcattacagagctgttgtgcagcgaggataatacgtgggcttgcacgttcaaaccagtcactcgtgagaggaataacgggaattttgagctgttcaccccagtattgtttgattttaggaatttggtccggtccgcctgtaatgacaatcgcctgtgggctgcgtgctaacacctgttcgcggctaacttgcggccagggaacccggctgtctttaaagatgttttctccgccacaaacttcgagtacctggttctgaatgctctcttttccactggtaaatggcggattaatgccgaattgcagaaaaacacgttttttaggtttatcagcatattgcgctttcaattgcgcgtactgatccagcagggattgcgcggcttgttcggccttgtctggttgcggactccagggggccagttgacgtaacgcattggcaatttgttcaatgcttgtcgcatcgacccacatcacttttattcccaggctagccagctggtcaacctgccgctcggcattacctccacgccaggcaatcaccagatcgggtttcagcgcgacaatgcgttccagattcatcccctgccaggtggaaacctgctcaatcttttgcgcttgtggaggatagtcggaatagctgctgaccccaaccggcgtgatcccggcggcaaaggcaagttcagtgttggcgggagaaagcgtgatgacgcgcggcgcggcgttgagccacagtggcgcaagaaaagacagggcgaccagcgccctgaacagactcttagccatgtgcaagtttctgcaccagactctcaaccatcaggctggactgtttagcggcaacagccaggaactcatcgaagctaagatgagactgttgatcggccacgtcggagatggcgcgtacgacaacaaacgggacgttgaaattgtggcagacatgggcgattgccgtcgcttccatctctacagcaatggcctgtgggaagttgtggcggattttcgccagaccaacagaaccgttgatgaaagcgtcgccgctaacaatcaggccacgtacagcgttaagattcagttcggcaatgcaggcctcagcggcagcgatcagtttatcgtcagctttaaagcctgccggacagcctggtaactgaccgtattcataaccaaatgccgtgacatccgcgtcgtgataacgtgcttcgtcgctgacaacgatatcgcccactttcaacgttggtgccaggccaccggcagaaccggtgttaataatcacatctggcttgcagtgttccaacagcaaagtggcacccagcgccgcagcgactttaccgatgccgcttttcagaagcgcaacctcggttccattcagttggccggtatagatttcgcaaccgccgagactgatagtttgacggttttcgattttgtcacgcagcagcgtaacttcttcttccattgcaccaatgatgccgattttcatagatttactcgcgataagcccgatttgaaggcatagtttaccatgcgcttacggggaagcgtatttctcacgcgggagaggacatggcacagattgatttccgaaaaaaaataaactggcatcgtcgttaccgtagtccgcagggcgttaaaaccgaacatgagatcctgcggatcttcgagagcgatcgcgggcgtatcatcaactctccggcaattcgtcgtctgcaacaaaagacccaggtttttccactggagcgcaatgccgccgtgcgcacgcgtcttacccacagcatggaagtccagcaggtggggcgctacatcgccaaagaaattttaagccgtctgaaagagcttaaattactggaagcatacggcctggatgaactgaccggtccctttgaaagcattgttgagatgagttgcctgatgcacgatatcggcaatccgccgtttggtcattttggcgaagcggcgataaatgactggtttcgccaacgtttgcacccggaagatgccgaaagccagcctctgactgacgatcgctgcagcgtggcggcactacgtttacgggacggggaagaaccgcttaacgagctgcggcgcaagattcgtcaggacttatgtcattttgaggggaatgcacaaggcattcgcctggtgcatacattgatgcggatgaatctcacctgggcacaggttggcggtattttaaaatatacccgtccggcgtggtggcgtggcgaaacgcctgagacacatcactatttaatgaaaaagccgggttattatctttctgaagaagcctatattgcccggttgcgtaaagaacttaatttggcgctttacagtcgttttccattaacgtggattatggaagctgccgacgacatctcctattgtgtggcagaccttgaagatgcggtagagaaaagaatatttaccgttgagcagctttatcatcatttgcacgaagcgtggggccagcatgagaaaggtagcctctttagcctggtggttgaaaatgcctgggaaaaaagtcgcagtaatagtttaagccgcagtacggaagatcagttttttatgtatttacgggtaaacaccctaaataaactggtaccctacgcggcacaacgatttattgataatctgcctgcgattttcgccggaacgtttaatcatgcattattggaagatgccagcgaatgcagcgatcttcttaagctatataaaaatgtcgctgtaaaacatgtgtttagccatccagatgtcgagcggcttgaattgcagggctatcgggtcattagcggattattagagatttatcgtcctttattaagcctgagcttaagtgactttactgaactggtagaaaaagaacgggtgaaacgtttccctattgaaagccgcttattccacaaactcagcacgcgccatcggctggcctatgtcgaggctgtcagtaaattaccgagtgattctcctgagtttccgctatgggaatattattaccgttgccgcctgctgcaggattatatcagcggtatgaccgacctctatgcgtgggatgaataccgacgtctgatggccgtagaacaataaccaggcttttgtaaagacgaacaataaatttttaccttttgcagaaactttagttcggaacttcaggctataaaacgaatctgaagaacacagcaattttgcgttatctgttaatcgagactgaaatacatgaaaaaaaccacattagcactgagtgcactggctctgagtttaggtttggcgttatctccgctctctgcaacggcggctgagacttctagtgcaacgacagcccagcagatgccaagccttgcaccgatgctcgaaaaggtgatgcctagtgtggtcagcattaacgtagaaggtagcacaaccgttaatacgccgcgtatgccgcgtaatttccagcagttcttcggtgatgattctccgttctgccaggaaggttctccgttccagagctctccgttctgccagggtggccagggcggtaatggtggcggccagcaacagaaattcatggcgctgggttccggcgtcatcattgatgccgataaaggctatgtcgtcaccaacaaccacgttgttgataacgcgacggtcattaaagttcaactgagcgatggccgtaagttcgacgcgaagatggttggcaaagatccgcgctctgatatcgcgctgatccaaatccagaacccgaaaaacctgaccgcaattaagatggcggattctgatgcactgcgcgtgggtgattacaccgtagcgattggtaacccgtttggtctgggcgagacggtaacttccgggattgtctctgcgctggggcgtagcggcctgaatgccgaaaactacgaaaacttcatccagaccgatgcagcgatcaaccgtggtaactccggtggtgcgctggttaacctgaacggcgaactgatcggtatcaacaccgcgatcctcgcaccggacggcggcaacatcggtatcggttttgctatcccgagtaacatggtgaaaaacctgaccagccagatggtggaatacggccaggtgaaacgcggtgagctgggtattatggggactgagctgaactccgaactggcgaaagcgatgaaagttgacgcccagcgcggtgctttcgtaagccaggttctgcctaattcctccgctgcaaaagcgggcattaaagcgggtgatgtgatcaccagtctgaacggtaagccgatcagcagctttgccgcactgcgtgctcaggtgggtactatgccggtaggcagcaaactgaccctgggcttactgcgcgacggtaagcaggttaacgtgaacctggaactgcagcagagcagccagaatcaggttgattccagctccatcttcaacggcattgaaggcgctgagatgagcaacaaaggcaaagatcagggcgtggtagtgaacaacgtgaaaacgggcactccggctgcgcagatcggcctgaagaaaggtgatgtgattattggcgcgaaccagcaggcagtgaaaaacatcgctgaactgcgtaaagttctcgacagcaaaccgtctgtgctggcactcaacattcagcgcggcgacagcaccatctacctgttaatgcagtaatctccctcaaccccttcctgaaaacgggaaggggttctccttacaatctgtgaacttcaccacaactccatacatcttcatcatcctttaggcatttgcacaatgccgtacgttacgtacttccttatgctaagccgtgcataacggaggacttatggctggctggcatcttgataccaaaatggcgcaggatatcgtggcacgtaccatgcgcatcatcgataccaatatcaacgtaatggatgcccgtgggcgaattatcggcagcggcgatcgtgagcgtattggtgaattgcacgaaggtgcattgctggtacttagtcagggacgagtcgtcgatatcgatgacgcggtagcacgtcatctgcacggtgtgcggcaggggattaatctaccgttacggctggaaggtgaaattgtcggcgtaattggcctgacaggtgaaccagagaatctgcgtaaatatggcgaactggtctgcatgacggctgaaatgatgctggaacagagccggttgatgcacttgttggcgcaggatagccgtttgcgggaagaactggtgatgaacctgattcaggcagaggagaatactcccgcacttactgaatgggcgcaacggctggggatcgatctcaatcaaccgcgagtggtggctattgttgaggtcgacagcggtcagcttggcgtggacagcgcaatggcggagttacaacaactgcaaaacgcgctgactacgcccgagcgtaataatctggtggcgattgtcagcctaaccgaaatggtggtgttgaaaccggcgttgaactcttttgggcgctgggatgcagaagatcatcgtaagcgagttgaacaactgattacccgcatgaaagagtacggccagctgcgttttcgcgttagtctgggcaactattttaccggtcctggcagtattgcccgatcctatcgtacggcgaaaacgacgatggtggtgggtaaacagcggatgccagaaagtcgctgctatttttatcaggatctgatgttacctgtgttactcgacagtttgcgtggcgactggcaggccaacgaactggcgcgaccgctggcgcggctgaaaacgatggacaataacggcttgctgcgacgaacgctggcggcgtggtttcgccacaatgtgcaaccgctggcaacgagtaaggcgttgtttattcatcgtaataccctggagtatcggcttaatcgtataagcgaactgaccgggcttgatttgggcaattttgatgacaggttgctgctgtatgtggcgttacaactggatgaagagcggtaagttatgcgttaaggttgaggcggcgctggctcattcccctcagcccgaagggtagaggggaatgcccgaattaaccgtcagttcgggattatttacgcgttagtttttccagatcggcttcaatctcgctgatcttattggttacgacactctccaggtgacgtaagtcgtcgaggatcttacgcttaagatcaacttcgctgcggtcacgctggcagatttgatcaagctcatcaatgatataccgtagattcgggctgatttcctggacttctttataaccctgacccacaccatcagcgacgaccgttttacgctgacgcggatatttaaacttaacgctcttggcgaaaaactcgcctttgtctttctggaaatagattttcagaatatcgttgttggcttcctgccggaggctgtaacgatcaatttcttcaggattggtaatacccagacttttcagattgtcgtacatagcgttacctcaaaatgagtcagtaaattgtgcttattttagcatttggcctggcccgcccggctcgactgtgatcgcagaaagcctttttcttccagacttctatcatggcgtaaaaatcaaaaaattacctgctttattctggtgataaaattcacgatttacaccagttccagcatcgttacttccgggcggcagttcagacgcaaaccatacaaactgcccacgccacgggttgtgtagatgtgtctttcgccaaaggcatttaatccggcgacgtaacgtttatcttcgacaggggcaaaaggttcaccaaccaacggtacgcgcagttgcccgccgtgagtatggccgcacagcatcagatcccagggttcatcacgcatgacttctttgctgtcgggattatgcgccagcaccagtcttggcagattggcttcgctggcgggaggcggtttgcattgtccggcccataagtcaccagtgcctaccagttcgaattgcctgttcggcgtggcgatcaccgtagcctggttaaacaacaccgtgatgcccgcacttttcaacgtctcgccaattaagtgatttttttctgtaccaacagggcgatcgtggttgccgaagcaggcaaacgtcggcgcacattcggcaaggggggagagtacgtcactaaacgcgctaaaattcaggctcatatcaaataatacgtaatcgccgcccagtaatatcaaatcgggcttttgttctatgccaagagcaatcgcgtcagaaatcaggcttaaaggaacaaaacgagagtaatggagatcggccagaaaaagaattttgaatggtgctgcgttgtctttaaaaaaggcgaggcggtgacggattaattcaaaccagcctggctcacagtaatgcatataaccgaaaccactgctcgtggctatcgtcgcggcagtagcctgcaaaaatcggcggcgactaatcatcgctcatccctgcaaaaaaatcgggcagcgtcgtgctgcccgtgtgcatacttttagtcgatggtacgcagcagttcgttaatgccgactttgccgcgagttttcgcgtcaactttcttaacgataaccgcacagtagaggctgtatttgccatctttactcggcagattaccactaacaaccacagaccccgccggaacgcgaccgtagtggatttcgccggtttcacggtcgtaaatacgggtgctctgaccaatgtatacgcccatggaaatgacggaaccttcttcgacaatcaccccttcaaccacttcagagcgcgcgccgatgaagcaattatcttcaatgatggttgggttagcctgcagcggttccagcacgccgccgatgcccacgccaccggaaaggtggacgtttttaccaatctgcgcacaagaaccgacggtcgcccaggtatcaaccatggtgccttcatcaacatatgcgccgatgttgacgtaagacggcatcagcacggtgttacgggcaataaacgcaccctgacgtaccgccgctggtggcacaacgcggaagccttctttctggaaacgtgcttcgtcgtagtcggcgaatttcatcggcactttgtcgaagtagcggctttctgccccttcgatcacctgattatcattaatacggaaagagagcagcaccgcttttttcaaccactgatgcgtcacccactgaccgtcaattttttccgctacacgcagtgcgccggaatccagcagggcgatcacctgatttaccgcttcgcgggtaacggtgtctgcattggctggcgtgatctcggcacggcgttcaaaagcggtttcaataatgttctgtaactgctgcattgttaaactcttttcatatcagtaaacacatcaccctttatcgtttggattgagggcctctgtcaaccgctgatgcacttcctgctgcaactcgttattaagcgcacgccggtcagcggtggcaattatgaataaatcttctactcgctcgccaatggttgtaattcgggcaccatgaaggctaattcccagatcggcaaaaattttcccgactcgcgccagcagtccaggttggtcgagggcgatcagttcgaggaagcttttgcggtcggtatgggtcggcaaaaacgttacttcggtttcaacagtaaaatggcgtaatttggcgggttggcgacggggctgcggtggctgccagctactttgcgtcagtacttgctccagaccaaaccgaataacctcatgacgatctgcggacagcgggttgccatcgggttccagcacgataaaggtatccatcgccataccgtcgcgagtggtgaaaatttgtgcgtcgtgaacacttaaattgcggcggtctaattcggcacagacggcggcaaacagataagggcggtccgggctccagataaaaatctcggtgcctccacgcgtagcctgcgggctaagcaataccagcggtttgcttaaatcatgctgtaataaatggcgggcatgccaggccagttgatttgggctatggcggacaaaatagttagcacgacagcgactccaaatttggtgcagcgcctcttcgtcgatgttatccatgcgcagtagtgccagtgcctggagttggtgatggcgaacccgttcgcgcatatccggcgtgttttgcattccgcgtcgtagctgcttttcggtggcaaagtagagctcacgcaacagactttgcttccagctattccacagcgtttcgttggtggcgcaaatgtcagccacagtcaggcataccagatagcgcagacgattttccgtttgcacttcttcggcaaactgcttgatgacttccgggtcctgaatatcgcggcgttgggcggtcacgctcatcaacaggtgctggcgaaccagccaggcgaccagctgtgtttcgcgactgttcagcccgtggagttcggcaaaatgcactacatcctgagcaccgagaatggagtggtcgccgccgcgtcctttggcgatatcgtgaaacagcgcggcgatgaaaatcagctcagtactcggcaggcgcggccagacgtccacacacaacggatggcgctggcgcgtttcttcactggcaaaactctccagtttcagcatcacgcggatagtatgttcatccaccgtgtaggcgtggaacagatcaaactgcatctgcccgacgatatggctccattgcggcatatacgcgccgagcacgctatggcgatgcattggcaatagcccgcgccgcaccgctccggggtgacgcagaatgctcaaaaacagttttcgtgcttccggaatattacacagcggttgttgcagatggcgacgggcatggcgtaactggcgcagcgtggtggagtaaatgccggtgatcgcactgttgtgcaccatggtgtagaacatacgcaagatggcttccggctggcgcataaatagtgtttcatcacgcaggtcgattagcgtaccgcgtagctgaaactcatcgtcgattggacgtggtttttcgtcggcgggaagggcgaggatggcttcatcgaacagttgcagcagcatctggttgagttcactgacgcggcgtgtaacgcggaagtaatccttcatcatccgctcgaccggttcgttaccttcaccactgtaattcagacgctgggcgacgctaagctggcgatcgaataacaggcgattatcgtaacggctgacgaccagatgcagggcaaagcgaatacgccacaatatatgcagacattcgtttaattccgcccgctccgcactggttaagaagccaaacccgaccatttcatccaggcttgttgcgccaaaatgacggcgggccacccattgcagagtgtggatatcgcgcaagccgccagggctgcttttgatgtctggttcaaggttgtagctggtgccatggtaacgctgatggcgctggttctgttcttcaactttcgccgcgtagaacttgtcggaaggccagaatccttcgctgaaaatatgtttttgcagttcgaggaacagcgcaacatcgccaattaataagcgggattcgattaaattggtggcgacggttaaatcgcttaacccttccagcatgcactcttcaagcgtgcgcacgctatgaccgacttccagctttacatcccagagcagcgttaacagctcgcccactttttgcgcctgatcgtccgggagctttttacggcttaaaatcagtaaatcgacgtcactaagtggatgcagctcgccacgaccgtagccaccgacggcgaccaatgccaggtcggcaatctggctgaatcccgcttcaatccataatcgttgcaggagctggtcgataaactcggtgcgcgcctcaatcaactgttctgcagagatcccattgtcaaaggcatcacccagccaacgctggaaagtatcgatatgggcttttatcccaccgacggttaattcatcacggggccagacgcatggattttgcggttgaccgggcagggtggggagagcggtgtttgcgtactgttctggaagggtattcattgtgcgccacccataagattaaattatcgcattaaaaaagccggcattcgccggcttcatcttattcgtcgtggctgattatcgccgggatggtgtcatccttgcgtagcgtcagaatttcgcagccgttatcagtcaccacaatagtatgctcatattgtgcagacaagctgcgatctttggtttttaccgtccagccatctttcatggtgcggatctcttttttacccgcgttgaccattggctcgatggtgaacgtcatcccaggtttcagtacgacgttggtttcacgggagtcatagtgcagcacctgcggttcttcatggaagccgcgaccaataccgtgtccgcaatattcacgaacgacggagaagccttctgcttcgacaaatttctgaatcgccgcaccgatttcgcgcagattaatgcctggttttaccatgcgtagcgccaggtacaggctttcttgcgtgatgcggcacagacgttcgcccatgatggtcggcttaccgacgataaacattttgctggtatcgccgtggaaaccatctttgattacggtgacatcaatgttaacgatatcgccatctttcagcagcttagcatcgtccgggataccgtggcacaccacttcattaatagagatgcaaacggatttcggatagccgtgatagccgaggcaggcagaaaccgcgtgttgttcattaacaatgtaatcattacagatgcgatccagctcgccggtgctgacgcccggtttaacatacggttcgatcatctccagcacttcggcagccagtcggccagcgacgcgcattttttcgatatcttctggggtcttgatactgatagccattaattctgtccatcagcgtcggtgataccgacaatatatatgtaagtgccgtcaatggtatcacacccgggcaaattgagaatcattctgaatttcgccaaacgtgccactgaaggttttctataatagaaaattcgacgtctgatgctgtacacagcgccaacaattattggtgtccacgacgtatttgtggtataaagcgcgccggacttccgatccatttcgtatacacagactggacggaagcgacaatctcactttgtgtaacaacacacacgtatcggcacatattccggggtgccctttggggtcggtaatatgggatacgtggaggcataaccccaacttttatatagaggttttaatcatggcaactgtttccatgcgcgacatgctcaaggctggtgttcacttcggtcaccagacccgttactggaacccgaaaatgaagccgttcatcttcggtgcgcgtaacaaagttcacatcatcaaccttgagaaaactgtaccgatgttcaacgaagctctggctgaactgaacaagattgcttctcgcaaaggtaaaatccttttcgttggtactaaacgcgctgcaagcgaagcggtgaaagacgctgctctgagctgcgaccagttcttcgtgaaccatcgctggctgggcggtatgctgactaactggaaaaccgttcgtcagtccatcaaacgtctgaaagacctggaaactcagtctcaggacggtactttcgacaagctgaccaagaaagaagcgctgatgcgcactcgtgagctggagaaactggaaaacagcctgggcggtatcaaagacatgggcggtctgccggacgctctgtttgtaatcgatgctgaccacgaacacattgctatcaaagaagcaaacaacctgggtattccggtatttgctatcgttgataccaactctgatccggacggtgttgacttcgttatcccgggtaacgacgacgcaatccgtgctgtgaccctgtacctgggcgctgttgctgcaaccgtacgtgaaggccgttctcaggatctggcttcccaggcggaagaaagcttcgtagaagctgagtaataaggcttgataactcccccaaaatagttcgagttgcagaaaggcggcaagctcgagaattcccgggagcttacatcagtaagtgaccgggatgagcgagcgaagataacgcatctgcggcgcgaaatatgaagggggagagcccttatagaccaggtagtacacgtttggttagggggcctgcatatggccccctttttcacttttatatctgtgcggtttaatgccgggcagatcacatctccgaggattttagaatggctgaaattaccgcatccctggtaaaagagctgcgtgagcgtactggcgcaggcatgatggattgcaaaaaagcactgactgaagctaacggcgacatcgagctggcaatcgaaaacatgcgtaagtccggtgctattaaagcagcgaaaaaagcaggcaacgttgctgctgacggcgtgatcaaaaccaaaatcgacggcaactacggcatcattctggaagttaactgccagactgacttcgttgcaaaagacgctggtttccaggcgttcgcagacaaagttctggacgcagctgttgctggcaaaatcactgacgttgaagttctgaaagcacagttcgaagaagaacgtgttgcgctggtagcgaaaattggtgaaaacatcaacattcgccgcgttgctgcgctggaaggcgacgttctgggttcttatcagcacggtgcgcgtatcggcgttctggttgctgctaaaggcgctgacgaagagctggttaaacacatcgctatgcacgttgctgcaagcaagccagaattcatcaaaccggaagacgtatccgctgaagtggtagaaaaagaataccaggtacagctggatatcgcgatgcagtctggtaagccgaaagaaatcgcagagaaaatggttgaaggccgcatgaagaaattcaccggcgaagtttctctgaccggtcagccgttcgttatggaaccaagcaaaactgttggtcagctgctgaaagagcataacgctgaagtgactggcttcatccgcttcgaagtgggtgaaggcatcgagaaagttgagactgactttgcagcagaagttgctgcgatgtccaagcagtcttaattatcaaaaaggagccgcctgagggcggcttctttttgtgcccatcttgtaaattcagctaacccttgtggggctgcgctgaaaagcgacgtacaatgtcgctagtattaattcatttcaatcgttgacagtctcaggaaagaaacatggctaccaatgcaaaacccgtctataaacgcattctgcttaagttgagtggcgaagctctgcagggcactgaaggcttcggtattgatgcaagcatactggatcgtatggctcaggaaatcaaagaactggttgaactgggtattcaggttggtgtggtgattggtgggggtaacctgttccgtggcgctggtctggcgaaagcgggtatgaaccgcgttgtgggcgaccacatggggatgctggcgaccgtaatgaacggcctggcaatgcgtgatgcactgcaccgcgcctatgtgaacgctcgtctgatgtccgctattccattgaatggcgtgtgcgacagctacagctgggcagaagctatcagcctgttgcgcaacaaccgtgtggtgatcctctccgccggtacaggtaacccgttctttaccaccgacagtgcagcttgcctgcgtggtatcgaaattgaagccgatgtggtgctgaaagcaaccaaagttgacggcgtgtttaccgctgatccggcgaaagatccaaccgcaaccatgtacgagcaactgacttacagcgaagtgctggaaaaagagctgaaagtcatggacctggcggccttcacgctggctcgtgaccataaattaccgattcgtgttttcaatatgaacaaaccgggtgcgctgcgccgtgtggtaatgggtgaaaaagaagggactttaatcacggaataattcccgtgatggataaataagggtaagattccgcgtaagtatcgcgggggcgtaagtctggttataaggcgttattgttgcaggcagtttggtcacggccagcgcgcagcaaccggagcgtacaaaagtacgtgaggatggcgagcactgcccggggccaaaatggcaaataaaatagcctaataatccagacgattacccgtaatatgtttaatcagggctatacttagcacacttccactgtgtgtgactgtctggtctgactgagacaagttttcaaggattcgtaacgtgattagcgatatcagaaaagatgctgaagtacgcatggacaaatgcgtagaagcgttcaaaacccaaatcagcaaaatacgcacgggtcgtgcttctcccagcctgctggatggcattgtcgtggaatattacggcacgccgacgccgctgcgtcagctggcaagcgtaacggtagaagattcccgtacactgaaaatcaacgtgtttgatcgtagtatgtctccggccgttgaaaaagcgattatggcgtccgatcttggcctgaacccgaactctgcgggtagcgacatccgtgttccgctgccgccgctgacggaagaacgtcgtaaagatctgaccaaaatcgttcgtggtgaagcagaacaagcgcgtgttgcagtacgtaacgtgcgtcgtgacgcgaacgacaaagtgaaagcactgttgaaagataaagagatcagcgaagacgacgatcgccgttctcaggacgatgtacagaaactgactgatgctgcaatcaagaaaattgaagcggcgctggcagacaaagaagcagaactgatgcagttctgatttcttgaacgacaaaaacgccgctcagtagatccttgcggatcggctggcggcgttttgctttttattctgtctcaactctggatgtttcatgaagcaactcaccattctgggcagcaccggcagcattggttgcagcacgctggacgtggtgcgccataatcccgaacacttccgcgtagttgcgctggtggcaggcaaaaatgtcactcgcatggtagaacagtgcctggaattctctccccgctatgccgtaatggacgatgaagcgagtgcgaaacttcttaaaacgatgctacagcaacagggtagccgcaccgaagtcttaagtgggcaacaagccgcttgcgatatggcagcgcttgaggatgttgatcaggtgatggcagccattgttggcgctgctgggctgttacctacgcttgctgcgatccgcgcgggtaaaaccattttgctggccaataaagaaagtctggttacctgcggacgtctgtttatggacgccgtaaagcagagcaaagcgcaattgttaccggtcgatagcgaacataacgccatttttcagagtttaccgcaacctatccagcataatctgggatacgctgaccttgagcaaaatggcgtggtgtccattttacttaccgggtctggtggccctttccgtgagacgccattgcgcgatttggcaacaatgacgccggatcaagcctgccgtcatccgaactggagcatggggcgtaaaatttctgtcgatagcgctaccatgatgaacaaaggtctggaatacattgaagcgcgttggctgtttaacgccagcgccagccagatggaagtgctgattcacccgcagagtgtgattcacagtatggtgcgctatcaggacggcagtgttctggcgcagctgggggaaccggatatgcgtacgccaattgcccacaccatggcatggccgaatcgcgtgaactctggcgtgaagccgctcgatttttgcaaactaagtgcgttgacatttgccgcaccggattatgatcgttatccatgcctgaaactggcgatggaggcgttcgaacaaggccaggcagcgacgacagcattgaatgccgcaaacgaaatcaccgttgctgcttttcttgcgcaacaaatccgctttacggatatcgctgcgttgaatttatccgtactggaaaaaatggatatgcgcgaaccacaatgtgtggacgatgtgttatctgttgatgcgaacgcgcgtgaagtcgccagaaaagaggtgatgcgtctcgcaagctgaggataatccggctacagagagtcgcgctatttgttagcgtagggcttcagtgatatagtctgcgccatctgatcgtaagtagttggctttataaggtcagatatgccgtggttttacacggcttttttttgtataggcttcagtattcctgagtaccgtaaaccctgtcagggaataaaaaacgcgtgatgttgtctgctactcaaccacttagcgaaaaattgccagcgcatggctgccgtcatgttgcgatcattatggacggcaatggccgctgggcaaaaaagcaagggaagattcgtgcctttgggcataaagccggggcaaaatccgtccgccgggctgtctcttttgcggccaacaacggtattgaggcgttaacgctgtatgcctttagtagtgaaaactggaaccgaccagcgcaggaagtcagtgcgttaatggaactgtttgtgtgggcgctcgatagcgaagtaaaaagtctgcaccgacataacgtgcgtctgcgtattattggcgataccagtcgctttaacagccgtttgcaagaacgtattcgtaaatctgaagcgctaacagccgggaataccggtctgacgctgaatattgcggcgaactacggtggacgttgggatatagtccagggagtcaggcaactggctgaaaaggtgcagcaaggaaacctgcaaccagatcagatagatgaagagatgctaaaccagcatgtctgtatgcatgaactggcccctgtagatttagtaattaggactgggggggagcatcgcattagtaactttttgctttggcaaattgcctatgccgaactttactttacagatgttctctggcccgatttcgatgaacaagactttgaaggggcgttaaatgcctttgctaatcgagagcgtcgtttcggcggcaccgagcccggtgatgaaacagcctgatgggggtcgcttttgctgaagtatcgcctgatatctgcttttgtgttaatacccgtcgtcatcgcggcgttgtttctgttgccgccggtggggttcgccattgtaacgctggtggtctgcatgctggcagcgtgggaatggggacagcttagcggttttaccactcgtagccagcgagtatggttggcggtgttatgcgggttattgttggcgctgatgctttttctgttgccggaatatcaccgaaatattcatcaaccgctggttgaaatcagtctttgggctagcctgggttggtggattgtcgcgctattgctggtgctgttttacccaggttccgcagcaatctggcgtaactctaaaacattgcgccttatttttggcgtgctaaccattgttcccttcttctggggcatgctggcgttacgggcctggcactatgacgagaatcattacagtggcgcaatatggctgctctatgtcatgatcctggtatggggcgctgactccggcgcatatatgtttggcaaattgtttggtaaacataagctggcaccgaaggtttctccgggtaaaacctggcaaggctttatcggtggactcgctactgcagcggtaatcagttggggttatggcatgtgggcgaatctcgacgtcgctcccgtcaccttactcatttgctctattgtcgcagcgttagccagtgtgctcggcgatctgaccgagagtatgtttaagcgtgaagcaggaattaaggacagcggtcatttaattccaggacacggtggtattttagatcgtattgatagcctgacggctgcggtaccggtctttgcttgcttgttgttactggtattcaggacgctttaacggaaggtaatatgctgagttttctctgggatttggctagcttcatcgttgcactgggtgtacttatcaccgtgcatgaatttggtcatttctgggttgcccggcgttgtggtgttcgcgttgagcgtttcagtatagggtttggtaaggcgctctggcggcgaactgataagctcggcaccgaatatgttatcgccctgatcccgttgggcggttatgtcaaaatgctggatgagcgcgcagaaccggtcgttccggaactccgccaccatgccttcaataataaatctgtcggccaacgagcggcgattattgccgcaggtccggttgcaaacttcatttttgctatctttgcctactggctggtttttattattggtgtgcctggcgtacgtccggtggttggcgaaatagcagccaatagcatagctgcggaagcacaaattgcaccaggtacggaactaaaagccgtagatggtatcgaaacgcctgattgggatgccgtgcgtttgcagttggtcgataaaattggcgatgaaagcaccaccattacagtagcgccatttggcagcgaccaacggcgggatgtaaagctcgatttacgtcactgggcgtttgagcctgataaagaagatccggtatctagcctggggattcgtcctcgtgggccgcaaattgaacctgtactggaaaatgtgcagccaaacagcgcggcaagcaaggcaggtttgcaagcaggcgacaggatcgttaaagtcgatggtcagcccttaacgcagtgggtgacctttgtgatgcttgtccgggataacccgggtaaatccttagcgttagaaatcgaaaggcaggggagtcccttgtctttgacattaatcccggagagtaaaccgggtaatggtaaagcgattggttttgtcggtattgagccgaaagtcattcctttgccagatgagtataaagttgtacgccagtatgggccgttcaacgccatcgtcgaagccacggacaaaacgtggcagctgatgaagctgacggtcagtatgctgggaaaattgatcaccggtgatgtgaaactgaacaacctcagtgggccgatctctatcgccaagggggctgggatgacagcggaactcggggttgtttattacctgccgtttcttgcgcttattagcgtgaacttagggataattaacctgtttccgttgcccgtacttgacggggggcatctgctgttccttgcgatcgaaaagatcaagggcggaccggtatccgagcgggttcaagacttttgttatcgcattggcagcattctgctggtgctgttaatggggcttgcacttttcaatgatttctctcggttatgagagttagttaggaagaacgcataataacgatggcgatgaaaaagttgctcatagcgagcctgctgtttagcagcgccaccgtatacggtgctgaagggttcgtagtgaaagatattcatttcgaaggccttcagcgtgtcgccgttggtgcggccctcctcagtatgccggtgcgcacaggcgacacggttaatgatgaagatatcagtaataccattcgcgctctgtttgctaccggcaactttgaggatgttcgcgtccttcgtgatggtgatacccttctggttcaggtaaaagaacgtccgaccattgccagcattactttctccggtaacaaaagcgtgaaagatgacatgctgaagcaaaacctcgaggcttctggtgtgcgtgtgggcgaatccctcgatcgcaccaccattgccgatatcgagaaaggtctggaagacttctactacagcgtcggtaaatatagcgccagcgtaaaagctgtcgtgaccccgctgccgcgcaaccgtgttgacctaaaactggtgttccaggaaggtgtgagtgctgaaatccagcaaattaacattgttggtaaccatgctttcaccaccgacgaactgatctctcatttccaactgcgtgacgaagtgccgtggtggaacgtggtaggcgatcgtaaataccagaaacagaaactggcgggcgaccttgaaaccctgcgcagctactatctggatcgcggttatgcccgtttcaacatcgactctacccaggtcagtctgacgccagataaaaaaggtatttacgtcacggtgaacatcaccgaaggcgatcagtacaagctttctggcgttgaagtgagcggcaaccttgccgggcactccgctgaaattgagcagctgactaagatcgagccgggtgagctgtataacggcaccaaagtgaccaagatggaagatgacatcaaaaagcttctcggtcgctatggttatgcctatccgcgcgtacagagcatgcccgaaattaacgatgccgacaaaaccgttaaattacgtgtgaacgttgatgcgggtaaccgtttctacgtgcgtaagatccgttttgaaggtaacgataccagcaaagatgccgtcctgcgtcgcgaaatgcgtcagatggaaggtgcatggctggggagcgatctggtcgatcagggtaaggagcgtctgaatcgtctgggcttctttgaaactgtcgataccgatacccaacgtgttccgggtagcccggaccaggttgatgtcgtctacaaggtaaaagagcgcaacaccggtagcttcaactttggtattggttacggtactgaaagtggcgtgagcttccaggctggtgtgcagcaggataactggttaggtacaggttatgctgttggtatcaacgggaccaaaaacgattaccagacctatgctgaactgagcgtaaccaacccgtacttcaccgtagatggcgtaagcctcggtggtcgtctcttctataatgacttccaggcagatgacgccgacctgtccgactataccaacaagagttatggtacagacgtgacgttgggcttcccgattaacgaatataacagcctgcgtgcaggtctgggttatgtacataactccctgtccaacatgcagcctcaggttgcgatgtggcgttatctgtactctatgggtgaacatccgagcacctctgatcaggataacagcttcaaaacggacgacttcacgttcaactatggttggacctataacaagcttgaccgtggttacttcccgacagatggtagtcgtgtcaacctgaccggtaaagtgaccattcctggaagcgataacgaatactacaaagtgacgttagacacggcgacttatgtgccgatcgatgacgatcacaaatgggttgttctggggcgtacccgctggggttatggtgatggtttaggcggcaaagagatgccgttctacgagaacttctatgccggtggttccagcaccgtgcgtggcttccagtccaataccattggtccgaaagcagtttacttcccgcatcaggccagtaattatgatccggactatgattacgaatgtgcgactcaggacggcgcgaaagacctgtgtaaaagcgatgatgctgtaggcggtaacgccatggcggttgccagcctcgagttcatcaccccgacgccgtttattagcgataagtatgctaacagcgttcgtacttccttcttctgggatatgggtaccgtttgggatacaaactgggattccagccaatattctggatatccggactatagtgatccaagcaatatccgtatgtctgcgggtatcgcattacaatggatgtccccattggggccgttggtgttctcctacgcccagccgttcaaaaagtacgatggagacaaggcagaacagttccagtttaacatcggtaaaacctggtaagtgttctccacaaaggaatgtagtggtagtgtagcgatgactttaggcgatcaatataagatcgccgggccacgcaaagaactgcaccctccggtgcaaatgggatggtaaggagtttattgtgaaaaagtggttattagctgcaggtctcggtttagcactggcaacttctgctcaggcggctgacaaaattgcaatcgtcaacatgggcagcctgttccagcaggtagcgcagaaaaccggtgtttctaacacgctggaaaatgagttcaaaggccgtgccagcgaactgcagcgtatggaaaccgatctgcaggctaaaatgaaaaagctgcagtccatgaaagcgggcagcgatcgcactaagctggaaaaagacgtgatggctcagcgccagacttttgctcagaaagcgcaggcttttgagcaggatcgcgcacgtcgttccaacgaagaacgcggcaaactggttactcgtatccagactgctgtgaaatccgttgccaacagccaggatatcgatctggttgttgatgcaaacgccgttgcttacaacagcagcgatgtaaaagacatcactgccgacgtactgaaacaggttaaataagtaatgcctagtattcgactggctgatttagcgcagcagttggatgcagaactacacggtgatggcgatatcgtcatcaccggcgttgcgtccatgcaatctgcacaaacaggtcacattacgttcatggttaacccaaaataccgtgagcatttaggcttgtgccaggcgtccgcggttgtcatgacccaggacgatcttcctttcgcgaaaagtgccgcactggtagtgaagaatccctacctgacttacgcgcgcatggcgcaaattttagataccacgccgcagcccgcgcagaacattgcacccagtgcggtgatcgacgcgacggcgaagctgggtaacaacgtaagcattggcgctaacgcggtgattgagtccggcgttgaactgggcgataacgtgattatcggtgccggttgcttcgtaggtaaaaacagcaaaatcggtgcaggtagccgtctctgggcgaacgtaaccatttaccatgagatccagatcggtcagaattgcctgatccagtccggaacagtggtaggcgcagacggctttggttatgccaacgatcgtggtaactgggtgaagatcccacagattggtcgcgtaattattggcgatcgcgtggagatcggtgcctgcacaaccatcgatcgcggcgcgctggatgacactattattggcaatggcgtgatcattgataaccagtgccagattgcacataacgtcgtgattggcgacaatacggcggttgccggtggcgtcattatggcgggcagcctgaaaattggtcgttactgcatgatcggcggagccagcgtaatcaacgggcatatggaaatatgcgacaaagtgacggttacgggcatgggtatggtgatgcgtcccatcactgaaccaggcgtctattccagtggcattccgctgcaacccaacaaagtctggcgcaaaaccgctgcactggtgatgaacattgatgacatgagcaagcgtctgaaaagccttgagcgcaaggttaatcaacaagactaacgttccatcttttgttcgccaaactttacggcctgtctcattcttacgattgcggcaggccgtgttattattgtcgtttcttatattttgacaggaagagtatcttgactactaacactcatactctgcagattgaagagattttagaacttctgccgcaccgtttcccgttcttactggtggatcgcgtgctggattttgaagaaggtcgttttctgcgcgcagtaaaaaatgtctctgtcaatgagccattcttccagggccatttccctggaaaaccgattttcccgggtgtgctgattctggaagcaatggcacaggcaacaggtattctggcgtttaaaagcgtaggaaaactggaaccgggtgagctgtactacttcgctggtattgacgaagcgcgcttcaagcgcccggtcgtgcctggcgatcaaatgatcatggaagtcactttcgaaaaaacgcgccgcggcctgacccgttttaaaggggttgctctggtcgatggtaaagtagtttgcgaagcaacgatgatgtgtgctcgtagccgggaggcctgatacgtgattgataaatccgcctttgtgcatccaaccgccattgtggaagagggcgcgagtattggcgcgaacgcacacattggtcctttttgtatcgttggaccccatgtcgaaattggtgagggtaccgtactgaaatctcacgttgtcgtgaatggtcatactaaaattggccgcgataatgagatttatcagttcgcctccatcggcgaagttaaccaggatctgaaatatgctggcgaaccgacccgtgtggaaatcggcgatcgtaaccgcattcgcgaaagcgtcaccattcatcgtggcacagtccagggcggtggattgacgaaggtgggcagcgacaacttactgatgatcaacgcgcacattgcgcacgattgtacggtaggtaaccgctgtattctcgccaacaacgcaacgctggcgggtcacgtaagcgttgacgacttcgcgatcatcggcggcatgaccgcagtccatcagttctgcatcattggtgcgcacgtgatggttggcggctgctccggtgtggcgcaggacgtccctccttatgtcattgcgcagggtaaccacgcaacgccgttcggtgtcaatatcgaagggctgaagcgccgcggattcagccgtgaggcgattaccgctatccgcaatgcgtataagctgatttatcgtagcggtaaaacgctcgatgaagtgaaaccggaaattgctgaactggcggaaacatatccggaagtgaaagcctttaccgatttctttgcacgcagtacgcgcggtctgattcgttaatgactgaacagcgtccattaacgattgccctggtcgccggagaaacctccggcgatatcctgggggccggtttaatccgcgctctgaaagaacatgtgcccaacgcccgctttgttggtgttgccgggccacgaatgcaggctgaaggctgcgaagcctggtacgaaatggaagaactggcggtgatgggcattgttgaagtgctcggtcgtctgcgtcgcttactgcatattcgtgccgatctgacaaagcgttttggcgaactgaagccagatgtttttgttggtattgatgcgcctgacttcaatattactcttgaaggtaacctcaaaaagcagggtatcaaaaccattcattacgtcagtccgagtgtctgggcgtggcgacagaaacgtgttttcaaaataggcagagccaccgatctggtgctcgcatttctgcctttcgaaaaagcgttttatgacaaatacaacgtaccgtgccgctttatcggtcataccatggctgatgccatgccattagatccagataaaaatgccgcccgtgatgtgctggggatccctcacgatgcccactgcctggcgttgctaccggggagccgtggtgcagaagttgaaatgcttagtgccgatttcctgaaaacggcccagcttttgcgccagacatatccggatctcgaaatcgtggtgccactggtgaatgccaaacgccgcgagcagtttgaacgcatcaaagctgaagtcgcgccagaccttagtgttcatttgctggatgggatgggccgtgaggcgatggtcgccagcgatgcggcgctactggcgagcggtacggcagccctggagtgtatgctggcgaaatgcccgatggtggtgggatatcgcatgaagccttttaccttctggttggcgaagcggctggtgaaaactgattatgtcagcctgccaaatctgctggcgggcagagagttagtcaaagaattattgcaggaagagtgtgagccgcaaaaactggctgcggcgctgttaccgctgttggcgaacgggaaaaccagccacgcgatgcacgataccttccgtgaactgcatcagcagatccgctgcaatgccgatgagcaggcggcacaagccgttctggagttagcacaatgatcgaatttgtttatccgcacacgcagctggttgcgggtgtggatgaagtcggacgcgggccgttagttggcgcggtcgtcaccgctgcggtgatccttgacccggcgcgcccgattgccgggctgaatgattccaaaaagctgagcgaaaaacgccgtctggcgctctatgaagagatcaaagagaaagcgttgagctggagtctgggccgcgcggaaccccacgaaatcgacgagctgaacattcttcatgcgaccatgctggcgatgcagcgtgccgtcgctgggctgcatattgcgccggaatatgtgttgattgatggtaaccgctgcccgaaattaccgatgcctgcgatggctgtggtgaaaggcgatagccgcgtaccggaaatcagtgccgcgtctatcctggcgaaagtgacgcgtgacgccgaaatggcggcgctggatattgttttcccgcaatatggttttgcccaacacaaagggtacccaaccgcttttcatctggaaaaactggctgaacacggcgcgaccgaacaccatcggcgcagctttgggcctgtcaaacgcgcactgggacttgcgtcctgattcttgtgtcgagattaagtaaaccggaatctgaagatgtctgaaccacgtttcgtacacctgcgggtgcacagcgactacagcatgatcgatggcctggccaaaaccgcaccgttggtaaaaaaggcggcggcgttgggtatgccagcactggcgatcaccgatttcaccaacctttgtggtctggtgaagttctacggagcgggacatggcgcagggattaagcctatcgtcggggcagattttaacgtccagtgcgacctgctgggtgatgagttaacccacctgacggtactggcggcgaacaataccggctatcagaatctgacgttgctgatcagtaaagcgtatcagcgcgggtacggtgccgccgggccgatcatcgatcgcgactggcttatcgaattaaacgaagggttgatccttctttccggcggacgcatgggcgacgtcggacgcagtcttttgcgtggtaacagcgcgctggtagatgagtgtgtcgcgttttatgaagaacacttcccggatcgctattttctcgagctgatccgcaccggcaggccggatgaagaaagctatctgcacgcggcggtggaactggcggaagcgcgcggtttgcccgtcgtggcgaccaacgacgtgcgctttatcgacagcagcgactttgacgcacacgaaatccgcgtcgcgatccacgacggctttaccctcgacgatcctaaacgcccgcgtaactatagcccgcagcaatatatgcgtagcgaagaggagatgtgtgagctgtttgccgacatccccgaagcccttgccaacaccgttgagatcgccaaacgctgtaacgtaaccgtgcgtcttggtgaatacttcctgccgcagttcccgaccggggacatgagcaccgaagattatctggtcaagcgtgcaaaagagggcctggaagagcgtctggcctttttattccctgatgaggaagaacgtcttaagcgccgcccggaatatgacgaacgtctggagactgaacttcaggttatcaaccagatgggcttcccgggctacttcctcatcgttatggaatttatccagtggagcaaagataacggcgtaccggtagggccaggccgtggctccggtgcgggtagtctggtggcctacgcgctgaaaatcaccgacctcgatccgctggaatttgacctgctgttcgaacgtttccttaacccggaacgtgtctccatgcctgacttcgacgttgacttctgtatggagaaacgcgatcaggttatcgagcacgtagcggacatgtacggtcgtgatgcggtaagccagatcatcaccttcggtacaatggcggcgaaagcggtgatccgcgacgtaggccgcgtgctggggcatccgtacggctttgtcgatcgtatcagcaaactgatcccgcccgatccggggatgacgctggcgaaagcgtttgaagccgagccgcagctgccggaaatctacgaagcggatgaagaagttaaggcgctgatcgacatggcgcgcaaactggaaggggtcacccgtaacgccggtaagcacgccggtggggtggttatcgcgccgaccaaaattaccgattttgcgccgctttactgcgatgaagagggcaaacatccggtcacccagtttgataaaagcgacgttgaatacgccggactggtgaagttcgacttccttggtttgcgtacgctcaccatcatcaactgggcgctggagatgatcaacaagcggcgggcgaagaatggcgagccgccgctggatatcgctgcgatcccgctggatgataagaaaagcttcgacatgctgcaacgcagcgaaaccacggcggtattccagcttgaaagccgcggcatgaaggacctgatcaagcgtctacaacctgactgcttcgaagatatgatcgccctagtggcactgttccgccccggtccgttgcaaagtgggatggtggataactttatcgaccgtaaacatggtcgtgaagagatctcctatccggacgtacagtggcagcatgaaagcctgaaaccggtactggagccaacctacggcattatcctgtatcaggaacaggtcatgcagattgcgcaggtgctttctggttataccctcggtggcgcggatatgctgcgtcgtgcgatgggtaagaaaaagccggaagagatggctaagcaacgttctgtatttgctgaaggtgcagaaaagaacggaatcaacgctgaactggcgatgaaaatcttcgacctggtggagaaattcgctggttacggatttaacaaaagccactctgcggcctatgctttggtgagttatcaaacgttatggctgaaagcgcactatcctgcggagtttatggcggcggtaatgaccgccgatatggacaacaccgagaaggtggtgggtctggtggatgagtgctggcggatggggctgaaaatcctgccaccagatataaactccggtctttaccatttccacgtcaacgacgacggcgaaatcgtgtatggtattggcgcgatcaaaggggtcggtgaaggtccgattgaggccatcatcgaagcccgtaataaaggcggctacttccgcgaactgtttgatctctgcgcccgtaccgacaccaaaaagttgaaccgtcgcgtgctggaaaaactgatcatgtccggggcgtttgaccgtcttgggccacatcgcgcagcgctgatgaacagcctgggcgatgcgttaaaagcggcagatcaacacgcgaaagcggaagctatcggtcaggccgatatgttcggcgtgctggccgaagagccggaacaaattgaacaatcctacgccagctgccaaccgtggccggagcaggtggtattagatggggaacgtgaaacgttaggcctgtacctgaccggacaccctatcaaccagtatttaaaagagattgagcgttatgtcggaggcgtaaggctgaaagacatgcacccgacagaacgtggtaaagtcatcacggctgcggggctcgttgttgccgcgcgggttatggtcaccaagcgcggcaatcgtatcggtatctgcacgctggatgaccgttccgggcggctggaagtgatgttgtttactgacgccctggataaataccagcaattgctggaaaaagaccgcatacttatcgtcagcggacaggtcagctttgatgacttcagcggtgggcttaaaatgaccgctcgcgaagtgatggatattgacgaagcccgggaaaaatatgctcgcgggcttgctatcagcctgacggacaggcaaattgatgaccagcttttaaaccgactccgtcagtctctggaaccccaccgctctgggacaattccagtacatctctactatcagagggcggatgcacgcgcgcggttgcgttttggcgcgacgtggcgtgtctctccgagcgatcgtttattaaacgatctccgtggcctcattggtagcgagcaggtggaactggagtttgactaatacaggaatactatgagtctgaatttccttgattttgaacagccgattgcagagctggaagcgaaaatcgattctctgactgcggttagccgtcaggatgagaaactggatattaacatcgatgaagaagtgcatcgtctgcgtgaaaaaagcgtagaactgacacgtaaaatcttcgccgatctcggtgcatggcagattgcgcaactggcacgccatccacagcgtccttataccctggattacgttcgcctggcatttgatgaatttgacgaactggctggcgaccgcgcgtatgcagacgataaagctatcgtcggtggtatcgcccgtctcgatggtcgtccggtgatgatcattggtcatcaaaaaggtcgtgaaaccaaagaaaaaattcgccgtaactttggtatgccagcgccagaaggttaccgcaaagcactgcgtctgatgcaaatggctgaacgctttaagatgcctatcatcacctttatcgacaccccgggggcttatcctggcgtgggcgcagaagagcgtggtcagtctgaagccattgcacgcaacctgcgtgaaatgtctcgcctcggcgtaccggtagtttgtacggttatcggtgaaggtggttctggcggtgcgctggcgattggcgtgggcgataaagtgaatatgctgcaatacagcacctattccgttatcagcccggaaggttgtgcgtccattctgtggaagagcgccgacaaagcgccgctggcggctgaagcgatgggtatcattgctccgcgtctgaaagaactgaaactgatcgactccatcatcccggaaccactgggtggtgctcaccgtaacccggaagcgatggcggcaagcttgaaagcgcaactgctggcggatctggccgatctcgacgtgttaagcactgaagatttaaaaaatcgtcgttatcagcgcctgatgagctacggttacgcgtaattcgcaaaagttctgaaaaagggtcacttcggtggcccttttttatcgccacggtttgagcaggctatgattaaggaaggattttccaggaggaacacatgaacatcattgccattatgggaccgcatggcgtcttttataaagatgagcccatcaaagaactggagagcgcgctggtggcgcaaggctttcagattatctggccacaaaacagcgttgatttgctgaaatttatcgagcataaccctcgaatttgcggcgtgatttttgactgggatgagtacagtctcgatttatgtagcgatatcaatcagcttaatgaatatctcccgctttatgccttcatcaacacccacagcacgatggatgtcagcgtgcaggatatgcggatggcgctctggttttttgaatatgcgctggggcaggcggaagatatcgccattcgtatgcgtcagtacaccgacgaatatcttgataacattacaccgccgttcacgaaagccttgtttacctacgtcaaagagcggaagtacaccttttgtacgccggggcatatgggcggcaccgcatatcaaaaaagcccggttggctgtctgttttatgattttttcggcgggaatactcttaaggctgatgtctctattagcgtcaccgagcttggtagcttgctcgaccacaccgggccacacctggaagcggaagagtacatcgcgcggacttttggcgcggaacagagttatatcgttaccaacggaacaagcacgagcaacaaaattgtgggtatgtacgccgcgccatccggcagtacgctgttgatcgaccgcaattgtcataaaagcctggcgcatctgttgatgatgaacgatgtagtgccagtctggctgaaaccgacgcgtaatgcgttggggattcttggtgggatcccgcgccgtgaatttactcgcgacagcatcgaagagaaagtcgctgctaccacgcaagcacaatggccggttcatgcggtgatcaccaactccacctatgatggcttgctctacaacaccgactggatcaaacagacgctggatgtcccgagcattcacttcgattctgcctgggtgccgtacacccattttcatccgatctaccagggtaaaagtggtatgagcggcgagcgtgttgcgggaaaagtgatcttcgaaacgcaaagcacccacaaaatgctggcggcgttaagccaggctagcctgatccacattaaaggcgagtatgacgaagaggcctttaacgaagcctttatgatgcataccaccaccagccccagttatcccattgttgctagcgttgagacggcggcggcgatgctgcgtggtaatccgggcaaacggctgattaaccgtagtgtagaacgagctctgcattttcgcaaagaggtccagcggctgcgggaagagtctgacggttggtttttcgatatctggcaaccgccgcaggtggatgaagccgaatgctggcccgttgcgcctggcgaacagtggcacggctttaacgatgcggatgccgatcatatgtttctcgatccggttaaagtcactattttgacaccggggatggacgagcagggcaatatgagcgaggaggggatcccggcggcgctggtagcaaaattcctcgacgaacgtgggatcgtagtagagaaaaccggcccttataacctgctgtttctctttagtattggcatcgataaaaccaaagcaatgggattattgcgtgggttgacggaattcaaacgctcttacgatctcaacctgcggatcaaaaatatgctacccgatctctatgcagaagatcccgatttctaccgcaatatgcgtattcaggatctggcacaagggatccataagctgattcgtaaacacgatcttcccggtttgatgttgcgggcattcgatactttgccggagatgatcatgacgccacatcaggcatggcaacgacaaattaaaggcgaagtagaaaccattgcgctggaacaactggtcggtagagtaagcgcaaatatgatcctgccttatccaccgggcgtaccgctgttgatgcctggagaaatgctgaccaaagagagccgcacagtactcgattttctactgatgctttgttccgtcgggcaacattaccccggttttgaaacggatattcacggcgcgaaacaggacgaagacggcgtttaccgcgtacgagtcctaaaaatggcgggataacttgccagagcggcttccgggcgagtaacgtgctgttaacaaataaaggagacgttatgctgggtttaaaacaggttcaccatattgcgattattgcgacggattatgcggtgagcaaagctttctactgcgatattcttggtttcacgctgcaaagcgaagtctatcgcgaagcgcgcgacagttggaaaggggatttggcgcttaatgggcaatatgtgattgagcttttcagttttccgttcccgccggaacgacccagccgaccggaagcttgcggtctgcgtcatctggcttttagcgttgatgacatcgatgcggcagtggcgcaccttgaaagccataacgtgaagtgtgaaaccatccgtgtcgatccatacacgcaaaaacgcttcaccttctttaacgatccggacgggctgccgttggaactgtatgagcagtaaggcttgtcatcgccgcatttgcccggtaacgtgccgggcattgctactgtaaaatcgcaccatcatgacactcacgctcaatagacaacttctcaccagtcgccagattctggtggcctttagcggcgggcttgactccaccgttctgctgcatcagttggtgcagtggcggacggaaaatccgggtgtcgctctgcgcgctattcatgtgcatcacggtttaagtgccaatgccgatgcctgggttacgcattgcgaaaacgtctgccaacagtggcaggtgccgctggtggtcgaacgcgtacaacttgcgcaagaaggactgggcattgaggcccaggcgcggcaggcacgttatcaggcatttgcccgcaccttgttgcccggtgaagtgctggtcaccgcgcaacatctcgacgatcaatgtgaaacctttctgctggcgctaaaacgcggcagtggccctgccgggcttagcgctatggcggaagtcagcgagtttgccggaacgcggcttattcgcccgttgctcgcccgcacgcggggggaactggtgcagtgggcgcgtcagtatgatttacgctggattgaagacgaaagtaatcaggacgacagttacgatcgtaactttctgcgcctgcgcgtagtgccgttattgcagcagcgttggccgcattttgccgaagcaacggcccgcagcgccgcactttgtgctgaacaagagagcctgctggatgaactgctggcagatgatttagcacactgtcaaagcccgcaggggacgctgcagattgtgccaatgctggcgatgagtgatgcccgccgcgcggcgattatccgccgctggctggcagggcagaatgcaccgatgccttcccgcgacgcgttggtgaggatctggcaggaagtggcgctggcgcgggaagatgccagtccctgtttacgtttgggcgcgtttgaaatccgacgctatcagagccaactgtggtggattaaatccgtcaccgggcaaagcgaaaacattgtgccgtggcagacgtggcttcaaccgctggaattaccggcggggctgggaagtgtacagcttaatgcgggaggcgatattcgccctccgcgtgcagacgaagcggtcagcgtgcgtttcaaagcgccaggattgctgcatattgtcgggcgtaacggcggacgtaagctaaagaaaatctggcaagagctgggcgtgccgccgtggctacgtgacaccacgccactgctgttttatggcgaaacgctgattgcggcggcaggggtatttgtgacgcaagaaggtgtggctgaaggtgagaatggcgtaagttttgtctggcagaaaacgcttagttaagtgaaagccggataagacgcatcaaacgtcgcatccggcgaaagtcaatcaggattcgcttaccaccaccgtaccgatttccgggtggctaaagctggtaattttatccagacgcagctcgcgggtttcgccagcggcctcgacgaccaggtactccacatttttgcgggagactaaatcactggcttttgcctgcaatttttcgccatctttcagctcaagtgtcagcattaaatgatgctggcaggcgagctcaagattatcgtaatcatcacaattgattggttgatacgtatcattcattgacataatcgctcaccagtaagtttgccgcagcgtatgctgctttttccctgacagcctcagaaagggcgtcgtcggcagccatttcattcagcactttcaaaacgcagcccagcgcgtccggaacgtatcctaagtctccgctggcgatttccgcgtaccgcttgcgtattaactcacaatatttttccacatgccctcctgtcagcactctgacttaaccgtggatgcaagtctaagcctacgaagataaactctgtttcgcaaggtgactataccacactcatttctgcaatatcagcgccgcaactgcacgtattccgttacaatggcctcctgattcgaaaggagttttcttatggcgcttaaagcgacaatttataaagcgacggttaatgtggccgatctcgaccgcaaccagtttctcgatgcctctctgacgctggcgcgccatcctagtgaaacccaggagcgtatgatgctgcgcttgctggcgtggctgaaatatgctgatgaacgtctgcaatttacccgtggtttgtgtgccgatgatgagccggaagcgtggctgcgtaacgatcacctgggcattgatttgtggattgagctggggctgccggatgagcggcggattaagaaagcctgcacccaggccgcagaagtggcgctgtttacctataatagtcgggcggcgcaaatctggtggcagcaaaatcagagcaaatgtgtgcagtttgccaatctttccgtctggtatctggacgatgaacaactggcgaaagtaagcgcctttgccgatcgtaccatgacgctgcaggcaacgattcaggatggcgtgatctggttaagcgatgataagaataatctggaagtgaacttaaccgcctggcaacaacctagttgaactaaaccgcctggcaacaaccttcatgattgtgatttcccgacatgttgctattcccgatggtgagcttgagatcaccgccattcgtgcgcagggcgcgggcgggcagcatgttaataagaccagtacggctattcatctgcgttttgacattcgggcgtccagcctgccagagtattacaaagagcgtctgctcgccgccagccatcatttgatcagcagtgatggcgtgattgtcattaaggcacaggaataccgcagtcaggaactgaaccgcgaagcagctctggcccggctggtggctatgattaaagaattaacaacagaaaaaaaagcccgacgacccacgcggcccacccgtgcaagcaaagagcgcaggctggcaagcaaagcacaaaaaagtagcgtgaaggcgatgcgcggcaaagtgcgcagcggtcgggaataaaaagaaggaatggatggtgaaaaaagcgatagtgacagcgatggctgtaatcagcctctttactctgatgggatgtaataatcgggccgaagtcgatacgctttctccggcgcaggctgccgaactgaaaccgatgccgcaaagttggcgcggcgtgctgccgtgtgccgattgcgaaggaatcgaaacctctctgttcctcgaaaaagacggaacatgggtgatgaatgagcgttatctcggtgctcgtgaagaaccttcctccttcgcttcctacggtacatgggcgcgaaccgctgacaagctggtattaaccgacagcaaaggtgaaaagagttattatcgggcgaaaggcgatgcgctggagatgctcgatcgtgaaggcaatccgattgaaagccagttcaactatacgctggaagcggcacaatccagtttacctatgacgccgatgaccctgcggggcatgtatttttatatggctgatgcggcgaccttcactgattgcgcgaccggaaaacgtttcatggtagcgaataacgcagagctggagcgtagctacctggctgcgcgcggtcacagtgaaaaaccggtgttactgagtgtagaaggtcactttacgcttgagggtaatccggataccggtgcgccgactaaagtattggcacccgatacggcagggaaattttaccccaaccaggattgcagtagtttggggcagtaacccgtcttgagacagaaacaaacgcaaaacaggccagaaggatatatttcaacattttgaatttgcacgttttttgtaggccggataaggcgtttacgccgcatccggcaatggtgctcaacgcctgatgcgacgctggcgcgtcttatcatgcctacaacccccctcataccttaaggcggataaggcatttactttatcaccgggtcaaaccaacaaagcgacccgccttgatataaatcccaggcttcaggtgcccaacatactgtaactgcgtttctggcttaaacgcagagacatcaccaatacgcatatgcatcagatcggcagggctaatccagccgctttgcgccagtgtaagtggatgcccggctttggcaaaggcatccgtgacaaattcgctacaaaaccagctctttttgtctccttcgcccacactgcttaactgcgctttcgccaggccgctgacgcactgttggcgaaaatcctcggagaacggattcagactgcacatctggcgagtcaccataaagggaataaattcgacaatgccgcgatagttataaccgctatctttgattttattggcaaacgcggtgatatctgtggcttgttgcggggtaagatccgggactcgtaagacgaaaagcttatcactatgcttcatcgcttttttaagggaaacgatctggacgccagcgcctgtcgcttctgcaacgttattatcacccagaaagattgcaacgtgactcacagaggaagtgctgaagacgcggattccaaaactggttaccccaaggctactggagaacagcaaatcgccgggtttgagatcaggtgccgttatttcttttatactttgttcggtgaaagagctttgatgctggaatttgacagcccatgtttttgcctcggcatctactgctgtggcacttgggtctggctggctgatatcaacggtacaagcgctaagtaaaagaaagctggggagaaacaggcggcagtacgcctttggtttatccattttatacaatccatgtaaaaaaagggccctgaaattcaggaccctttctggcatcagcctttaatctgtttcaccagatattcgacgatgtcaccagtcttaattaactgtttctcgccgttgcgacgatatttatattcgatatcgtcgttgtcgaggttacggtcgcccagcacaatagtgtgcggaataccgatcagttccatatcagcaaacatcacgcccggacgctctttgcggtcatccagcagcacttcgataccttgtgcacgcagttcgctgtacagtttctcagcaagctcttgtacgcggaaggatttgtgcatgttcatcggcagaatcgccacctggaacggcgcgatagcgtcaggccatacgatgcctcgttcgtcgtagttctgctcaatcgccgcagctaccacacgcgttaccccgataccgtagcaacccatcgtcaggatttggttacggccatcttcaccctgtacggaggctttcagtgcttcggagtacttggtacccagctggaagatgtgaccaacttcgataccacgtttgatcagcagcctaccctggccatccgggcttggatcgccagccaccacgttacggatatctgcaacttccggggtagcgacatcgcgatcccagttgatgccgaagtagtgtttaccatcgatgttagcaccagcagcgaaatcactcatcgccgcaacggtacggtcaatcaccaccggaatcggcatgtttaccggacccagactacccggaccggctttaaccacggcacgaatttcttcttcggtcgcgaaagtcagcgggcttgcaacctgcggcagtttttctgctttaacttcgttcagctcgtgatcaccgcgcaccagcagcgcaacctgcgggaagctgctgccttcaaccgctttaaccagcagagtcttaaccgttttctcaatcggcagattgaactgttcaaccagttccgcgatggttttcgcgttcggcgtatcaaccagcgtcatttcctgggtagcagcagcgcgcggttctttcggcgcgatagcttctgccagttcaatgttcgctgcatagtcagaggtgtcggagaagaccacatcgtcttcaccgctctgcgccagcacctggaattcgtgagaggcgctgccgccgatagaaccggtgtcggcttgtacggcgcggaaatccagccccatgcggctgaagattttgctgtaggccgcatacattgcatcgtaggtttcctgcagggattcctgagaagtatggaaagagtaagcatctttcatcaggaattcgcgggaacgcatgacgccgaaacgcggacgcacttcgtcgcggaacttggtctggatctgatagaagttcagcggcagctgtttgtaagagctaagctcgttacgaatcaggtcagtgataacttcttcatgagttgggccgagtacgaacggacgctcgccacggtcaacaaaacgcagcagttccggaccgtactgttcccaacgaccactctcttgccacaaatcggctggctgaaccaccggcatgctcacctcgatcgcaccggcgttgttcatctcttcacgcacgatgttttcgacttttttcagaacgcgcacgccggtcggcagccaggtatataacccggaggccagcttgcggatcatcccggcgcgcagcatcagctgatggctgatcacctcggcgtcggcaggtgtctccttgagagtggagagcaggtattggctagtacgcatgttgttacggttccagttggaaggtagaacaggctcaaggcgagcctgggacaaaaaaaagtgatttagtttaccagtgcaaaagaaatgtcaaaagagaagggcgtgaatttaacgcggttccagcgcaaagacttcaaaacctgcgtcggtgacgcgccagcgaacgttaaaatcatgtagccagacggcataggttttgcccgtttcctcacctttacgataggccgggcgcgggtcctgcgccagtacttcgcggataaacagcgttaactgcggataacgcttctccagcgtcaaaagctgcttttcgacctctgcggtaaaactcaccgccatctctgcagctggcgcactttgcgcatagctggcactggcatcgggaaggctttcggcaaaggggagatacggtttgatatccactaccggcgtaccatcgaccagatccagactgccgagcttcagaatcacgctgtctttatggcaaacaacctctttcagctctaccaggctcatgccaattgggttagggcggaaagtagagcgtgttgcgaaaacccccattctggcgttaccgccgaggcgcggtggacgcacagtcggacgccagccgccttccatcgtttgatgaaagacgaaaaggatccataaatggctgaacgcttccaggccgcgaacggcgtcggcctggttgtagggagcaatgagatgcagttcgccgttggcgctttttaccagacctggctggcgcggaacggcgaacttttctttataggggctgcgaataacgcctatttgctcgaactggaaactgctcatttcgccgtaatgttaagcgcagaaccgatacatacagcctgacgatagcagcctggcgtaccgctggtgacttcgcagctatgcagtaatacagcattggctttcattttagaggcgttgatttgcatccgcttacgtgcggttggaatgctcggcggagagtcctgattagaggcctggcaagagtcgccactgacttcaccgagatcgcggaacggtttgccgactaattcttctgcattggtataaattcggaccggcgtggcgcgcggcgctttcggttttgcaggctccgctttcggctggggtgcagtgctttgaacgggttcgacaggggatctgcttaacatggaacagccgcttagcatgagtgctactaaacagatcggtaaagcacgcatagtatttcctcaatgtatgatcaaaacgtcaatattgaatcaggagcttgtaaaaatgacaagacgggcaagcgcccgtcctgaatgatattacaaattgtggaaacagcctaaaaattaccagcctttaacagctccgccgttaaacactttgtttgctgcttcgtaaacttcgtcagactgataagcctggacgaatttcttcacgttctcggcgtctttgttatcttcacgcgtcacgatcaggtttacgtacggggactctttatcttcaacaaagataccgtctttcgccggagtcaggccaatctggctggcataggtggtattgataactgccagagcgatttgcgcgtcgtccagagaacgcggcagttgcggtgcttccagttcaacaattttcagatttttggggttctcaacaacatcaagaacggtcggcagcaggccaacgccatctttcagtttgatcaagcccactttttgcagcagcagcagactacgaccaaggttagttgggtcgtttggcacggcaacctggctaccatcctgcagttcatccagacttttgattttcttggagtaaccagcaatcggataaacaaaagtgttgcctactgcgaccagtttgtagccacgatctttcagttgctgatcaaggtacggtttatgctggaaggcgttggcgtcgatatcgcctttgctcaatgcttcgtttggcagaacatagtcgttgaaggttaccagctcaacgtccaggccatatttgtctttcgcaactttctgcgcgacttctgcaacctgctgttcggcaccaacaatcacgccgactttaatgtggtttggatctttttcatcctgaccgcagcctaccagtgccagacttccgatcagggctcccactgccgcaaaggttttgaatttgaacgccataccttattccttcttcaattatttatgttgtgttgaacgttacttgcgagtgacagcccggacgatgcggtcgcctgcgaactgaattaaataaaccagaatgaccagcaataccagtaccgtattcatcaccgtcgcgttatagccgatgtagccatactgatagccaatctgacctaaaccaccggcaccgactgcaccacccatcgcggaataaccgaccagggtaatcagggtgatagttgccgcattcaccagacccggcagcgcttccggtaacagcaccttacggacgatctgcatcggcgtggcacccattgcgcgggaagcttcaattaacccggttgggatctccagcagagcgttctcgaccatacgggcaataaacggtgctgcaccaacggttaacggaacaatcgctgcctgcaaaccaatgcttgtaccgacaataacgcgggtaaacggaatcatccatacaagcaagataatgaacgggatggaacggaaaatgttcacaatcgcagaaacggtacgatacagcttcgcgttagcaataatttgccccggacgcgtgacataaagcagaacgccaaccggcagaccaatcacaaagccaaaaaaaccggatacgaaggtcattgccagcgtttcccatacgccacgaaccagcagccacatcatcggctcagacataacccagtacctctacttttacatggtgttcctgcagccaggcaatggcggcttgcgtatcttgttgtgtgccgtgcatttcagtcagcatgatgccgaacttaacgccaccggcgtaatccatctgcgcgctaataatgttgttgttgacgttgaaacgacgcgcggtttcagaaagcagtggggcatcgacgctttgaccggtaaactccagacgcagcatcggcacgcagtcagtaaatggctccgcttgcagacgttcctggtaatcttccgggatatccagatgcagggtgctctgaataaacttctgcgccagcggcgttttcggatggctgaacacttcacttaccgtgtcctgctcgatcagttctccattgctgatgaccgccacgcaatcacaaatgcgcttcacaacgtccatttcgtgggtgatcaacagaatcgtcaaccccagacggcggttgatgtctttcagcagttcgagaatagaacgtgtcgttgccgggtccagcgcgctggtggcttcatcacacagcaatactttgggattgctggctaacgcacgggcaattgccacacgttgtttctgcccaccggaaagattgctcgggtagctatcatgcttatcgccaagaccaaccaaactcagcaattccgtcacgcgacgtttgacctcgtctttcggtgtgttgtccagctccagcggcagagccacgttgccaaaaacagtacggctagagagcaggttaaaatgctggaaaatcataccaatctggcggcgagctttggtcaactcggattcactcagcgtggtcagttcctggccatcgaccagcacgctaccctcggttgggcgctccagcaggtttacacaacgtataagcgtactcttacccgcgccactggcaccgataacgccataaatttgtccagctggcacatgcaggctgacgttgttcaacgcctggatggtgcgggtgccctggtggaacactttggtgatattgctaagttttatcattgattatttattatcgtcattaagttagtcgtggcatctcgaatgcctgaaacgggcaacgccgtcaatgaaatggatgttaaggcatccagacgtctaaatcaatcaggtttatgcgaagagcactttcttgcaggtcgaaacatgcgatactagcgtcacatgccttattaaggagctataaaaggtggcgaagagcgtacccgcaatttttcttgaccgtgatggcaccattaatgtcgatcacggctatgtccatgagatcgacaactttgaatttatcgacggtgttattgacgccatgcgcgagctaaaaaaaatgggctttgcgctggtggtagtaaccaaccagtctggcattgctcgcggtaaatttaccgaagcacagtttgaaacgctgaccgagtggatggactggagcctggcggaccgagatgtcgatctggatggtatctattattgcccgcatcatccgcagggtagtgttgaagagtttcgccaggtctgcgattgccgcaaaccacatccggggatgcttttgagtgcacgcgattatttgcatattgatatggccgcttcttatatggtgggcgataaattagaagatatgcaggcagcggttgcggcgaacgtgggaacaaaagtgctggtgcgtacgggtaaacctattacgcctgaagcagaaaacgcggcggattgggtgttaaatagcctggcagacctgccgcaagcgataaaaaagcagcaaaaaccggcacaatgattaaaagatgagcggttgaaataaaaatgcatttttccgcttgtcttcctgagccgactccctataatgcgcctccatcgacacggcggatgtgaatcacttcacacaaacagccggttcggttgaagagaaaaatcctgaaattcagggttgactctgaaagaggaaagcgtaatatacgccacctcgcgacagtgagctgaaagccgcgtcgcaactgctctttaacaatttatcagacaatctgtgtgggcactcgaagatacggattcttaacgtcgcaagacgaaaaatgaataccaagtctcaagagtgaacacgtaattcattacaaagtttaattctttgagcatcaaacttttaaattgaagagtttgatcatggctcagattgaacgctggcggcaggcctaacacatgcaagtcgaacggtaacaggaagaagcttgcttctttgctgacgagtggcggacgggtgagtaatgtctgggaaactgcctgatggagggggataactactggaaacggtagctaataccgcataacgtcgcaagaccaaagagggggaccttcgggcctcttgccatcggatgtgcccagatgggattagctagtaggtggggtaacggctcacctaggcgacgatccctagctggtctgagaggatgaccagccacactggaactgagacacggtccagactcctacgggaggcagcagtggggaatattgcacaatgggcgcaagcctgatgcagccatgccgcgtgtatgaagaaggccttcgggttgtaaagtactttcagcggggaggaagggagtaaagttaatacctttgctcattgacgttacccgcagaagaagcaccggctaactccgtgccagcagccgcggtaatacggagggtgcaagcgttaatcggaattactgggcgtaaagcgcacgcaggcggtttgttaagtcagatgtgaaatccccgggctcaacctgggaactgcatctgatactggcaagcttgagtctcgtagaggggggtagaattccaggtgtagcggtgaaatgcgtagagatctggaggaataccggtggcgaaggcggccccctggacgaagactgacgctcaggtgcgaaagcgtggggagcaaacaggattagataccctggtagtccacgccgtaaacgatgtcgacttggaggttgtgcccttgaggcgtggcttccggagctaacgcgttaagtcgaccgcctggggagtacggccgcaaggttaaaactcaaatgaattgacgggggcccgcacaagcggtggagcatgtggtttaattcgatgcaacgcgaagaaccttacctggtcttgacatccacagaactttccagagatggattggtgccttcgggaactgtgagacaggtgctgcatggctgtcgtcagctcgtgttgtgaaatgttgggttaagtcccgcaacgagcgcaacccttatcttttgttgccagcggtccggccgggaactcaaaggagactgccagtgataaactggaggaaggtggggatgacgtcaagtcatcatggcccttacgaccagggctacacacgtgctacaatggcgcatacaaagagaagcgacctcgcgagagcaagcggacctcataaagtgcgtcgtagtccggattggagtctgcaactcgactccatgaagtcggaatcgctagtaatcgtggatcagaatgccacggtgaatacgttcccgggccttgtacacaccgcccgtcacaccatgggagtgggttgcaaaagaagtaggtagcttaaccttcgggagggcgcttaccactttgtgattcatgactggggtgaagtcgtaacaaggtaaccgtaggggaacctgcggttggatcacctccttaccttaaagaagcgtactttgcagtgctcacacagattgtctgatgaaaatgagcagtaaaacctctacaggcttgtagctcaggtggttagagcgcacccctgataagggtgaggtcggtggttcaagtccactcaggcctaccaaatttgcacggcaaatttgaagaggttttaactacatgttatggggctatagctcagctgggagagcgcctgctttgcacgcaggaggtctgcggttcgatcccgcatagctccaccatctctgtagtggttaaataaaaaatacttcagagtgtacctgcaaaggttcactgcgaagttttgctctttaaaaatctggatcaagctgaaaattgaaacactgaacaatgaaagttgttcgtgagtctctcaaattttcgcaacacgatgatggatcgcaagaaacatcttcgggttgtgaggttaagcgactaagcgtacacggtggatgccctggcagtcagaggcgatgaaggacgtgctaatctgcgataagcgtcggtaaggtgatatgaaccgttataaccggcgatttccgaatggggaaacccagtgtgtttcgacacactatcattaactgaatccataggttaatgaggcgaaccgggggaactgaaacatctaagtaccccgaggaaaagaaatcaaccgagattcccccagtagcggcgagcgaacggggaggagcccagagcctgaatcagtgtgtgtgttagtggaagcgtctggaaaggcgcgcgatacagggtgacagccccgtacacaaaaatgcacatgctgtgagctcgatgagtagggcgggacacgtggtatcctgtctgaatatgggggggaccatcctccaaggctaaatactcctgactgaccgatagtgaaccagtaccgtgagggaaaggcgaaaagaaccccggcgaggggagtgaaaaagaacctgaaaccgtgtacgtacaagcagtgggagcatgcttaggcgtgtgactgcgtaccttttgtataatgggtcagcgacttatattctgtagcaaggttaaccgaataggggagccgaagggaaaccgagtcttaactgggcgttaagttgcagggtatagacccgaaacccggtgatctagccatgggcaggttgaaggttgggtaacactaactggaggaccgaaccgactaatgttgaaaaattagcggatgacttgtggctgggggtgaaaggccaatcaaaccgggagatagctggttctccccgaaagctatttaggtagcgcctcgtgaactcatctccgggggtagagcactgtttcggcaagggggtcatcccgacttaccaacccgatgcaaactgcgaataccggagaatgttatcacgggagacacacggcgggtgctaacgtccgtcgtgaagagggaaacaacccagaccgccagctaaggtcccaaagtcatggttaagtgggaaacgatgtgggaaggcccagacagccaggatgttggcttagaagcagccatcatttaaagaaagcgtaatagctcactggtcgagtcggcctgcgcggaagatgtaacggggctaaaccatgcaccgaagctgcggcagcgacgcttatgcgttgttgggtaggggagcgttctgtaagcctgtgaaggtgtactgtgaggtatgctggaggtatcagaagtgcgaatgctgacataagtaacgataaagcgggtgaaaagcccgctcgccggaagaccaagggttcctgtccaacgttaatcggggcagggtgagtcgacccctaaggcgaggccgaaaggcgtagtcgatgggaaacaggttaatattcctgtacttggtgttactgcgaaggggggacggagaaggctatgttggccgggcgacggttgtcccggtttaagcgtgtaggctggttttccaggcaaatccggaaaatcaaggctgaggcgtgatgacgaggcactacggtgctgaagcaacaaatgccctgcttccaggaaaagcctctaagcatcaggtaacatcaaatcgtaccccaaaccgacacaggtggtcaggtagagaataccaaggcgcttgagagaactcgggtgaaggaactaggcaaaatggtgccgtaacttcgggagaaggcacgctgatatgtaggtgaagcgacttgctcgtggagctgaaatcagtcgaagataccagctggctgcaactgtttattaaaaacacagcactgtgcaaacacgaaagtggacgtatacggtgtgacgcctgcccggtgccggaaggttaattgatggggttagcgcaagcgaagctcttgatcgaagccccggtaaacggcggccgtaactataacggtcctaaggtagcgaaattccttgtcgggtaagttccgacctgcacgaatggcgtaatgatggccaggctgtctccacccgagactcagtgaaattgaactcgctgtgaagatgcagtgtacccgcggcaagacggaaagaccccgtgaacctttactatagcttgacactgaacattgagccttgatgtgtaggataggtgggaggctttgaagtgtggacgccagtctgcatggagccgaccttgaaataccaccctttaatgtttgatgttctaacgttgacccgtaatccgggttgcggacagtgtctggtgggtagtttgactggggcggtctcctcctaaagagtaacggaggagcacgaaggttggctaatcctggtcggacatcaggaggttagtgcaatggcataagccagcttgactgcgagcgtgacggcgcgagcaggtgcgaaagcaggtcatagtgatccggtggttctgaatggaagggccatcgctcaacggataaaaggtactccggggataacaggctgataccgcccaagagttcatatcgacggcggtgtttggcacctcgatgtcggctcatcacatcctggggctgaagtaggtcccaagggtatggctgttcgccatttaaagtggtacgcgagctgggtttagaacgtcgtgagacagttcggtccctatctgccgtgggcgctggagaactgaggggggctgctcctagtacgagaggaccggagtggacgcatcactggtgttcgggttgtcatgccaatggcactgcccggtagctaaatgcggaagagataagtgctgaaagcatctaagcacgaaacttgccccgagatgagttctccctgactccttgagagtcctgaaggaacgttgaagacgacgacgttgataggccgggtgtgtaagcgcagcgatgcgttgagctaaccggtactaatgaaccgtgaggcttaaccttacaacgccgaagctgttttggcggattgagagaagattttcagcctgatacagattaaatcagaacgcagaagcggtctgataaaacagaatttgcctggcggccgtagcgcggtggtcccacctgaccccatgccgaactcagaagtgaaacgccgtagcgccgatggtagtgtggggtctccccatgcgagagtagggaactgccaggcatcaaattaagcagtaagccggtcataaaaccggtggttgtaaaagaattcggtggagcggtagttcagtcggttagaatacctgcctgtcacgcagggggtcgcgggttcgagtcccgtccgttccgccacttattaagaagcctcgagttaacgctcgaggttttttttcgtctgtatatctattattgccagaatcgcaaaaatcctctgcattttacgctctttttcctcaacagtctgaagcccataatcacctcagttaacgaaaatagcattaaaagaggcatattatggctatccctgcatttggtttaggtactttccgtctgaaagacgacgttgttattagttctgtgataacggcgcttgaacttggttatcgcgcaattgataccgcacaaatctatgataacgaagccgcagtaggtcaggcgattgcagaaagtggcgtgccacgtcatgaactctacatcaccactaaaatctggattgaaaatctcagcaaagacaaattgatcccaagtctgaaagagagcctgcaaaaattgcgtaccgattatgttgatctgacgctaatccactggccgagtccaaacgatgaagtctctgttgaagagtttatgcaggcgctgctggaagccaaaaaacaagggctgacgcgtgagatcggtatttccaacttcacgatcccgttgatggaaaaagcgattgctgctgttggtgctgaaaacatcgctactaaccagattgaactctctccttatctgcaaaaccgtaaagtggttgcctgggctaaacagcacggcatccatattacttcctatatgacgctggcgtatggtaaggccctgaaagatgaggttattgctcgtatcgcagctaaacacaatgcgactccggcacaagtgattctggcgtgggctatgggggaaggttacagtgtaattccttcttctactaaacgtaaaaacctggaaagtaatcttaaggcacaaaatttacagcttgatgccgaagataaaaaagcgatcgccgcactggattgcaacgaccgcctggttagcccggaaggtctggctcctgaatgggattaagcctctctgacagctcctccgggagctgtttttacatgctcgctaaggaaatcgataaaagcccggatgcgcgtacttaccgcacggtcgctgtaatagacggcactgaatggcatttccactggcaacactttatctgccattaactccaccaattctccgcgagcgatttctttgtcgatcatgtagtcggacaaacacgcaatcccgttgccactcaggcaaagctgtttcagtgtttccccactattggaactcaaaccgtacttcacctcatgtaattgtccatcgctacgggctatcggccaggtattgagggaagcgggttcagtgaatcccaggcaaatatgttgctttaaatcgtcgatcgtttctggcttcccgtagcgggaaatataatcgggggaggcgataatttttcgataactgttaaataacggcctggcacgtaagctggaatccgttaacgtaccagcgcgtatcgcgacatccacttttctttcgatcaaattaataatcgtttcggaggagactaggctcaaagtgacttccggatagcgttcacggaaaggcttaattaacggcatcagaaagtgcagcaccactggagttgcggcatcgatccgtaacagtccacgcggtgtattacgcgtctccataatttcactttctgccgctgccatctcctgcaaaatactctgtacgcgacgaaaataacgctcgccttcttccgtcaggctaagttgtcgcgtggtccgattaagcaggctaacgccaagtttcatctccagctttttcaccgcccggcttaccgcactgtttgcttgccctaattgttccgctgcccggctaaagctgccgctttcgacgacgctaacaaaaatggcgagttcttcgctcgtggctttcatttttgctcctgttgcaaaatagaagagatattttgaatttatttgtcattaaaccatcaggatgcgtgatatgtcatgcgatttaatgttctccataatgagcaaaattctgaccggtgtaagcacttgcttacataacaatatacaattgctcgttgaaagagtgagctaaaatccctataacagtagaaccctcccgagtgcggaagggttgacgtaatagaggtttcaaagtcaaaagtgcgaaaaaacacctatgccatgcgctatgttgccggacaacctgcggaaaggatcttaccgccggggtcttttgcgagcatcggccaggcattaccacctggggaaccgttaagtaccgaagagcgtattcggatcctggtgtggaacatatacaaacagcaacgcgctgaatggttgagcgtattaaagaactacggcaaagatgcacatctggtgttattgcaggaagcgcagacaacgccagagttagtacagtttgcgaccgctaactatcttgccgccgatcaggtacccgctttcgtgctgccacaacatccttctggcgtaatgacccttagcgcggcacatccagtgtattgctgcccgttacgtgaacgagaacccattttgcgtctggcgaagagcgcactggtgacggtctatccattacctgacacccgcctgttgatggtggttaatatacacgccgtcaacttcagtctgggcgtggatgtctatagtaagcagttacttcctattggcgatcagatagctcaccacagcggcccggtcattatggcgggagatttcaatgcctggagccgtagaaggatgaacgcgttatatcgctttgcgcgggaaatgagcctgcgccaggtgcgttttaccgatgatcagcgccgtcgggcgtttggtcgcccgctcgattttgttttctaccgtggtctgaacgtcagtgaagcttctgtactggttacgcgcgcttccgatcacaatccgctactcgttgaattcagtcccggcaagcctgataaataaggtatgagtggtctgccacagggcagaccaacgtttggcgctgcgcaaaacgtgagcgcggtggtggcgtatgacttatctgcccacatgctggatgtcgtggcacaagctgccgaagcccggcaactgaaaaatatcaccacccgccagggatatgccgaaagtctgccatttgccgataacgcatttgatattgttatcagccgttattctgcccatcactggcatgatgttggtgcagcactgcgagaagtgaataggatattgaaacctggcggtaggctgattgtgatggacgtaatgtctccgggtcacccagtgcgcgacatctggttacagacggtagaagcattacgcgatacctctcacgtacgaaactacgccagcggtgagtggttgacgttaatcaatgaagccaatctgatagttgataatttaattacagataagttaccgctggaattttctagttgggtcgcgagaatgcgtacgccagaagcgttagtagacgctattcgcatttaccaacagagcgcaagcacagaggtgagaacgtattttgccttgcagaatgatggctttttcaccagtgatatcatcatggtagatgcacataaagcggcataaataaaaaaggcaccgggggaatcggtgcctttttattatctggtttgtcaggaatctggcatgttgttgtttttcacaaacaacgtcagcttatcgcctggttgcagattcgcagtgtcgctgttccagcgcatcacatctttgatgttcacgccgtggcgtttagcaatgctactaaggctatcgcctttgcgcacacgatacgtaatgctatcgctgttgtttgccagtcgctgtgcgctactgcctgcaccaatcgtcaaactttggcctggcttcagcttagatccgcgcagtttgttccactgctgcaaatctttggtgcttacgccgagacgactagcgatactactaagcgtgtcgccagagcgtacggtgtaaacacggctgttaagcggcgtattgtcggcaaccagcgtgctctgtacagcagcaatttcgccactagccagagattcacgcagttgatctgcatgcttctttggcaccatcacgtactgcgggccacttgcgcccagcgtggagccttttacgccagcgttgaatgtcttcagcttgctgacggaaatccccgccatatctgctaccttcgccatttcaaccgggctgctcaggtgcacacgcgccagagcacggctttcatcggtcgttggcagacgtacgccataacgcttgctgtttttgagaatatcactcaatgccagcattttaggcacgtactgcttcgtttcctgcggcaacggtaagctccagaagtccgtggatttcccacgcgctttgttcgttttaattgccttcatgacccgaccttcgccgctgttataagccgctacggtcagaagccagtcgccgtcaaacattttgttcagacgctgcatcatattcagcgcggcagttgtactagcaacaacatcgcgacgcgcgtcataattgcgggtctgtttcaaaccataattgcgccccgtgctcggaatgatctgccagatgcctgcggcattggcgccagacgttgcgtgaggatcaaaagcgctctccactatgggtagtagtaccagttccataggcatgttacgttttttaacttgccctgctatccagtacatatacggctctgcccgtaaagttacatcgtggagatagctcttattgcgtaaatatttctgtttctgttcgcgaatccggtcattttccggaattcccatctttagctcgtcgccaatgaaagcccacaagtcaccatctggcgcgatagacgtcccatcgtccatccatcgtgcctgacttgtaaactttgctgcttccccttgaccagctgcagaaaggctctgtgcgtgctgttgaacgttgccggtactctggcaacccacgagcaggacagaggcgagtaatatcgcttttgccttcatgtgtgtgtcaatagttgcttaaaagacgaccgatcataacggcgaacggagccgatgacaagaaagttttatcagaacctatctttcttactccttaaccatgcaaaacgctcttcaggttgttgcaataatgtttcttcattaattacattaattaaatcaatatcttccgttcttaaaaaaacattaatttgccgctcatttttcagaattacgggtagtgttatttgattttttgcccgtaactccttaactttacgataataatcatttatggacaaatcgtgcggaagaatactcaaagcaaacttcatattacttaaggtatattcatgagcacaacataccaatgtatcgtcaggtaacgcacttaactttttaagactttgatacatttgacttgctgtcccttcaaacaaccgaccacacccaccagaaaacagtgtgtcgccgcaaaatagataaggtttactgaagtaacagatatgtcctaaagtgtgacccggcgtagcaattacactaaattcatgccccaaaacgaaggcagtttcgccatctttgactacctgtgttgttcccttatcttgtgtctcttgtggaccatacaccacaatttgtggaaacttttccaccagttcttttacgccgccaacgtgatcgtggtgatggtgggtgagaaatatggcctccggttgccagttattggcggcaatggcgtttaatactggctctgcgtctccgggatcgacaatcaggcagcgacctgcttcatcattcaaaacccagatgtaattgtcatcaaaggcgggaatactgttaagattcatagattacctctcagtgtgaaacggaaggttgtgatgaaaccggcaagagtccctcaaactgtcgtggctcctgattgctggggcgatttgccctggggaaagctttatcgcaaggcgctggagcgccagctcaacccgtggttcactaaaatgtatggttttcatctgcttaagattggcaatttaagcgcagaaatcaattgcgaagcgtgcgcggtttctcatcaagtgaatgtttctgcgcaaggaatgcccgtccaggtacaggcggacccacttcatcttccttttgccgataaatccgttgatgtttgtctactggcacatacattgccgtggtgcaccgatccgcatcgtttattgcgtgaagccgatcgggtattgattgatgatggctggctggtcattagtggcttcaatcccatcagttttatgggattacgcaaacttgtgccggtattgcgcaaaaccagcccctataacagccggatgtttactctgatgcggcagctggactggctctctttgttgaattttgaagtgctacacgccagccgtttccacgttctcccgtggaacaaacacggaggaaaactattgaatgcgcatattcctgcgcttggttgcttacaacttattgttgcccggaaacggactattcctttaacgctaaatccgatgaaacagagtaaaaacaagccacgaattcgccaggcggttggagccacccggcaatgtcgtaaaccacaggcttaaacttcaacttggtagcctgtatcttccagtgtgggattcatcgccgcggcacgagccagttcatcacagcgttcgttttccgggtgtccggcatggcctttaacccattcccatttgatttgatgctgccccaatgcagcatcaagacgttgccagagatcgacattttttactggttttttgtctgcggttttccagccacgttttttccagttatggatccactgggtgataccctggcggacatactggctgtcggtactcaaaatgacttcgcaatgttcttttaacgcctccagcgcgacaatagcggccatcaactccatacggttgttggtggtgcgggtgtagccagcgctaaaggttttctcgcgtccgcgatagcgtaaaatagcgccgtaacccccaggtcctggattgcccagacagctaccatcggtgaaaatttctacctgtttaagcatctctggtagacttcctgtaattgaatcgaactgtaaaacgacaagtctgacataaatgaccgctatgagcactgcaattacacgccagatcgttctcgataccgaaaccaccggtatgaaccagattggtgcgcactatgaaggccacaagatcattgagattggtgccgttgaagtggtgaaccgtcgcctgacgggcaataacttccatgtttatctcaaacccgatcggctggtggatccggaagcctttggcgtacatggtattgccgatgaatttttgctcgataagcccacgtttgccgaagtagccgatgagttcatggactatattcgcggcgcggagttggtgatccataacgcagcgttcgatatcggctttatggactacgagtttagcttgcttaagcgcgatattccgaagaccaatactttctgtaaggtcaccgatagccttgcggtggcgaggaaaatgtttcccggtaagcgcaacagcctcgatgcgttatgtgctcgctacgaaatagataacagtaaacgaacgctgcacggggcattactcgatgcccagatccttgcggaagtttatctggcgatgaccggtggtcaaacgagcatggcttttgcgatggaaggagagacacaacagcaacaaggtgaagcaacaattcagcgcattgtacgtcaggcaagtaagttacgcgttgtttttgcgacagatgaagagattgcagctcatgaagcccgtctcgatctggtgcagaagaaaggcggaagttgcctctggcgagcataaatacctgtgaaaggcgctaaaaatagcgacttgggcgatttttgcagcaaacgattcaaaagatgagaaaaaccgttgacgaaggtcgaggcaatccgtaatattcgcctcgttcccaacggaacacaacgcggagcggtagttcagtcggttagaatacctgcctgtcacgcagggggtcgcgggttcgagtcccgtccgttccgccactattcactcatgaaaatgagttcagagagccgcaagatttttaattttgcggtttttttgtatttgaattccaccatttctctgttcaatgattttactctggcgtaggtgcgtgattctcgcttgttgtctcattcattaaaattcaataatgatatcgaaccattcagcttaaatatatttctagagaataaatttatattgattaaatgaatgtatatttcaaattgattttgtttgttattatttaagtgaggtatataattagagtccgttatcaatgctaaatattctaatcattatgacaggcgagggagtgtccaattatgaatagtaaaaagctttgttgcatatgtgtgttattcagcctgcttgcaggatgtgcctctgaatcttctattgatgaaaagaagaaaaaagctcaagtcacacaaagtaatattaataaaaacactccccagcaactgacagacaaagatttattcggtaatgaaaccactctggccgtatccgaagaggatattcaagctgcgcttgatggagatgagttccgcgttccccttaattctcctgtaatacttgttcaatccggcaaccgcgcaccggaaaccattatgcaggaggagatgcgaaaatattatactgtttccacattctctggtatcccggacaggcaaaagcctctgacttgtaacaaaaacaaagataaaaatgagaacgaggatgttgccagtgctgagaatatgaactggatgcaggcactgcgttttgtggctgcaaaaggacatcagaaagcgattattgtttaccaggatatgttgcagacaggaaaatatgactctgcgctgaaaagtacagtatggtccgactataaaaatgacaaactcactgacgctatctccctgcgctacctggtacgtttcacgctggtggatgtggcaacaggtgagtgggctacctggagcccggtgaattatgaatataaagtgcttccaccattgcccgacaagaatgaagccagtacgactgatatgacagagcagcaaatcatgcaacttaagcaaaagacctataaagcgatggtaaaagatttggttaaccgctatcaataataaattatatctgccgccaggaatttctggcggcaataatacaaaattctttgcataagaaatttttcttgacaaagacagtgcaagaaaggacatggaatccggagttaaaaactgtttgttttagaatatttaattatttaactgctgaatcttccttgcgagaaatatatccattattacatttcatgccatttttaatatagattgctcctgggaaaattcccgtattattaccgcaggggtgataattagtattgacatatcctgtgacaaaaggagctattaaaggtgctattacgatagctattagtaaaaatataagagttagctgtattgttatgtctgtggcgaaattgactaccttcgtttttttgattaagaatgattttattatcgtaagtaaaattacatgaatatttaaaaaggaaaacgacatgaaaccgaagcacagaatcaacattctccaatcataaaatatttccgtggagcattttattattgaatatagaggtttaactccggtaaaaaacaaagaagcattgaatgcagggaaaaataatatggccataaaaaacatcgaaagaaactcttttaatttaacatgtaaacgcatggttaatcctcatatcacgggtggagtgttaagaacatacataaatggagtcatgttttcccttttccatttatcaagttcctgttgccgttttagtccatctctaattgcatattttaatttttcacttaaatggcattgagcatcgatttcatttaaaacaactgtacacactatccctgtcagtaaaattgctcctccgacaagaattactggaaagccaaagctaacacaggcaaaagaagccagacttccaatagcggttgcaacaccaccggctataactgctttggccacatccatactaaaatcgccaagaaaattaaccagatctcgctcactactcataataaattctatggttctgctgatttaaccgcagagaagttcgccacagcaatccgaaaccactggcacgtggagaataagctgcacaggcgtctggacgtggtaatgaatgaagacgactacaaaataagaagaggaaacgcagcagaattatttagtgggatacggcacattgctattaatattttgacgaatgagaaggtattcaaggcagggttaagacgtaagatgcgaaaagcagccatggacagaaactacctggcgagtgtccttgcggggagcgggcttagctaataataccccgactctccccgtccttaaacacaacccccactcaccacaacctaaactcatccgcatcctgccatgccggaaacttttctctatattcccgcaatgctgccatgctcagctccgcatcaatgcgcgttgcctgatgcgcgtcggcagtagcgataatctctccttgcggattaatcacccggctgtcaccgcgataatggcagccgttgccatcgctgccgacgcgattgcatcccgccacatacgcctgattctcaatcgcgcgggccgtcagcaatgcctgccagtgcagagagcgcggagcaggccagttggcgacgtacagggcgaggtcataatcgttgagattgcggctccacacaggaaaacgtaagtcgtagcacaccagcggcaaaatacgccagccgcgccattccacaatcactcgcgcattgcccgctttataatgtagatgctcatctgccatgcggaacagatgacgcttatcataaaaatgtaccgtgccgcccggctcaaccagcaaaaagcggttaacgctaccagactccgtttgtaatgcaacactgcctgcaatcagcgcattgcactgctgcgccttagctgtcatccagttcactacgtcatcttgtgctaggctgctagctgccgcttccatggcaaagccgctggtaaacatctccggtagaacgatcacatcgcgcccggtaataccttccagttgacgatcaaaatgacgcaggttggcaggaccatccatccacaccagtggttgctgcaaaagcgtaatcttcaaaccaggcacggtgtacaactcctttatgcgaagggttttataactttaacaccttatcaggcagttgccttagcgcagaataaattgataacaaatgctgatattggaaatatctgatttgcaaattatcgtgttatcgccaggctttaggaggttaataacatgggcaggataagcagcggaggaatgatgtttaaggcaataacgacagtcgccgctctggtcatcgccaccagtgcaatggcgcaggatgatttaaccattagcagccttgcaaagggcgaaaccaccaaagctgcatttaatcagatggtacaagggcataagctgcctgcctgggtgatgaaaggcggtacttatactcccgcacaaaccgtaacgttgggagatgagacgtatcaggtgatgagcgcgtgcaaaccgcatgactgtggcagccaacgtatcgctgtgatgtggtccgagaaatctaatcagatgacggggctgttcagcactattgatgagaaaacgagccaagagaaactcacctggctgaatgtgaacgatgcgcttagcattgatggtaaaacggtgttgttcgcggcgttgaccggcagcctggaaaaccatccggatggctttaattttaaataattagcggataaagaaacggagcctttcggctccgttattcatttacgcggcttcaactttccgcactttctccggcaactttaccggcttcgtcgccagctcttccggatcaaagtcatcaacgttaatactgcgcagacggctttcttcagctttcaccagaatagcggcttcatctttatcaatcagccccttcaccagcgcgttgtgcgccagttcatccagacgggtaaacggcaggtttttacccagctctttacagatccgctgatgaattgggtcggcggcaatcacatccaccagcgcctcttccagcaagccaaccggattatgctcgctcggcgtcaggtactgaccgcgaccaatgcgggaacgggtggcgttcggcacttgtaaaatcttcgccactttatgatccagcttgtcagaaggtgccagataatgacgtccggtcgggaagatcaccacattcagcagcccggcaaccacgcggttcgggaagttttgcagtaaatcatccatcgcctgttcagcctgatacagcgcatcttgtacgccccagtgcaccagcggcaggtcggcttcattacggccttcgtcgtcataacgcttcagcacggcagaggcgaggtagagctggcttaaaatatcccccagacgggcgctgatgcgctcgcgacgtttcaggctgccgcccagcactgccatgctgacatcagaaagcagggcgaggttggcgctcaggcggttcaggtgctgatagtagcgtttagtggcatcgccggttggcgtgctgctggttaaaccgcgcgtcaggcccagccagaagctgcgaactttgttgctaccgacgtgaccgatatgtttgaacaacagtttatcgaacgcgttgacgtcattgttcttcgccgcttccatctcttccagcacgtacggatggcaacgaatcgctccttgtccgaagatcatcatgctgcgggtcagaatgttagccccttcaacggtgatggcaatcggtgcgccctggtaagcacgcgccaggaagttgctttgcccgagcataatgcctttaccgccggtaatatccatcgcatcaataatgctctgctgcccgcggtgggtacagtgatacttaacgatagcgctcagcacggcaggtttttcgccgagcataatgccgtaggtaatcaggcttgccgcagcatccatcacgtaggcattaccggcaatacgcgccagcggctcttcaatcccttccatcttaccaatagagattttgaactgacggcgaatgtgagcatacgcgccggttgccagcgctacgcttttcacgccgccggtactgttggaaggcagggtgatgccgcggcctacgctgaggcactccaccagcatccgccagccttgcccggccattttcggcccgccgatgatgtaatcgatcggcacgaagacatctttaccgcgcgtcggtccgttctggaacggtacgttcagcgggaagtggcgacgaccaatttccacgcccggcgtggtggttgggatcagcgcacaggtaatgcctaaatcttctgcaccgccgagtaatttttccgggtcggagagtttaaacgccagcccaagcacggtcgcaatcggtgccagcgtaatgtagcgtttgttccaggtcagacgcatccccagcacctgctggccctgccattcgcccatgcagacaatcccggtgtccggaatcgcgcccgcatcggaacccgcttccgggctggtcagtgcaaagcaggggatctcctgaccacgcgccagacgcggcagatagtgatctttctgctcgtcagtgccgtaatgttgcaacagttcgcccgggcctaaactgtttggcacgccgacggtaatcgccaggatcccgctcacgccggagagtttttgcagcacgcgagactgggcataagcgctgaactccagcccgccgtactcttttttgatgatcatcgcgaagaaacgatgctctttaaggtacgcccacaactccggcggcagatccgccagctcatgggtgatctggaaatcattcgccatccggcaggcttcttctaccgggccgtcgagaaacgcttgctcttcggcggtcaggcgcggctgcggatagttatgcagctttttccagtccggcttgccctggaacaagtcgccctcccaccaggtggtgcccgcatcaatcgcttctttctcagtgcggctcatcggcggcatcaccttacggaaaccgcgaaataccggcgcggaaatcatgctcttacgcataggcgcaaagttaaatggcacgaggataatggccagaggcaccagtacccacgcgctccacagaccagcaacgccgagggcggctgtccaggcgagcaaaatcagactgctgataaataagctcacgcggtgatagaacaacgcgccgagcaggacaaccgtagcgagaatactcaaaatcatcataacgaaaagccccttacttgtaggaggtctgaccacttgtgatgatatggttgtagtggatgtaaaaacatttagcaatatgtttacaatataattacaacaaagctcacattgttgctgtttttatccgcacttcaggtcaaaaagtcctggtcatagcacctgcccgtacttctcgcttttggcggtatccggtacactgcattttgtctattacatttatgctgaaggatatcctcatgtaccaggatcttattcgtaacgaactgaacgaagcggcggaaacgctggctaactttttaaaagatgacgccaatattcacgccattcagcgcgcggcggtcctgttagcagacagctttaaagccggtggcaaagtgctttcctgcggcaacggcggttcccattgcgacgctatgcactttgccgaagagttgaccggtcgctaccgtgaaaaccgtccgggctacccggcgattgctatttctgacgttagtcatatttcctgcgtcggtaatgatttcggtttcaatgatattttctcccgctacgttgaagcggtaggtcgcgaaggcgatgtactgctggggatctccacctccggtaactctgcaaacgtgatcaaagcgatcgcagcggcgcgtgagaagggaatgaaagtgatcaccctgaccggtaaagacggcggcaaaatggctggcacggcggatatcgaaattcgcgtaccgcactttggttatgccgaccgcattcaggagattcacattaaagtgatccatatcctgatccagttgattgaaaaagagatggttaagtaagtctggcgtaggccggataagacgtttacgccgcatccggcatttgtgcgctgatgcctgatgcgacgctgacgcgtcttatcatgcctacaaatctgtacgcgaaccgtaggccgaataatgcgttcacgccgcatccgacctgaaaattcttaaatcaatcttcgccgggggccatgcgctcccgctgttgtggaggttacccatgtgcgaattgctcgggatgagcgccaacgtccctaccgatatctgctttagtttcaccgggcttgtacagcgtggtggtggaaccgggccacataaagatggctggggcattaccttttacgaaggtaaaggctgtcgcacatttaaagatccacaacccagctttaattcccccatcgccaaacttgtccaggactacccgataaaatcctgtagcgtggtggctcatattcgccaggctaatcggggcgaggtggcgctggaaaatactcacccatttacccgcgagttatgggggcgtaactggacttatgcccataacggacaactgacgggctacaaaagtctggaaaccggcaacttccgcccggtaggcgaaaccgacagcgaaaaagccttctgctggctcctgcataaattaacgcagcgttacccgcgcacaccgggcaacatggcggcggtatttaaatatatcgccagtctggcggatgaactgcggcagaagggcgttttcaacatgctgcttagcgacgggcgctatgtaatggcgtattgcagcactaatttacactggatcacccgccgcgcgccgtttggcgtggcaacgttgctggatcaggatgtggaaatcgacttcagcagccagaccacaccgaatgatgtggtcacggtgattgcaacacagccgctgacgggcaatgaaacctggcaaaagattatgccaggcgaatggcgcttattttgcctcggggagcgtgtagtttgattattttgcctcggggagcgtgtagttacttgccagttgtggctgcacaacttcgtggcttaacggcttgctgaccacgtaacgaccattgaccacagaaacggttggtggcttacgggtttgctcaaagtagtcgtaacccggcttcagttgctcccagaagtccttaaagttggaatatttatggcgcttcatattggcgtcggtcatgcggaacgggtaaatactcacttgcacgctcggctgaccaaacaccagcgcaccagtaacgaactggaatatctcatcaataccctgattggtcattgcgtagcagccgatggaaacacaatcgccgtggatcatcaggtatttcccttcataaccatgcgcacggtcataggcattggggaaaccaatattaatcgctttgtagtaacggctgtctggttttaactgattacgctggacgctataaaacccttccgggcttttgaaatcgccctgacgctgttttggccctaagccgccggaatatttacagattttatagctgtcgagcagttgatattgctcgcccattttgacgtagagatcgagcgtacgttcttccttgaagatctggatgtagacaggggatcccatcaactgctgcttatactctttgctcacaggcgtggtagagctactgctgcccagcaaaccggcaaaactaacgcacgggatcaacaacatcgcaagaattaatgcgattttacgcatactgcttattccttgataaaacggttacacacgccaggacggcaaaatggatcccaaatcggaatagtctggatttggaaggctcacattatcaccaaaagagttttacgcaagcctgtcggcgcagggtttacaaatttcatcggaagcgggctttacccaaagagcgccgcgtgagttccagttctctcaaatcgtaaaagtttatcggtaagtttgtaaatcaggatccagtccggttcgacatgagcatcgcgataacctttccaactaccttgcagcgggtggtctttataaacagctggaagcggtaaagtattattgataagaagcgtcataagatatttcaatttattcatatccttatgacgcttttgtgcaagttttacatccttactatattgtccgctgtattcaatatccctttgaatcatatttaaattcctaatttatcaaataaatcatcggcgtctttggccttatgaacatcaatgccagcttcgctgtttttgatactttgaatggttaattgattaggctcgcgtaaatcaaacggcaatgccttttcacgcgcgacctttgtgagggttatgcgaaccaggtcagagatggtcagccccatcccggccagtacgtccgctgcctgattcttcagatcttcatcgattcgggcgcgaacaaacgcgttagcagccattggggtatctcctgtgctgtatatttattcagcttgaattgtagctcaaatgagcaacagcgacaatccatgagtaatttaataaacggatgtttttacataattaactgaaatatatatgttaattttataataatggtttattaagtttgttcagaaacgatccgggatacactgcaacattaaagcatgaccagccattattgagtatgtccttgccgagcattccatcctttgtattgagcggattactgttgatttgtttgccgttttctagttttgccagcgccaccacaagtcatatctctttcagctacgccgcccgccagcggatgcaaaaccgtgcgcgtttattaaaacagtaccaaactcatctgaaaaagcaggccagctatattgtggaaggcaatgccgaaagcaaaagggcgctacgccagcacaaccgggagcagataaaacagcatccagaatggtttcctgctccgctcaaggcgagtgacagacgctggcaggcgctggcggaaaacaaccactttttaagcagcgaccatctgcataacattaccgaagtggcgattcaccgcctggagcagcagcttggcaagccttacgtctggggcggtacgcggcctgataaaggctttgactgtagcgggttggttttttatgcctacaacaagatccttgaggctaagctcccgcgcacggccaatgagatgtaccactatcgccgggcaacgattgtggcgaacaacgacctgcgccggggagatttgctgtttttccatatccacagccgcgagatagccgatcatatgggcgtgtatttgggcgatgggcaatttatcgagagcccacgtaccggcgaaaccattcggataagccgattagccgaacctttctggcaggaccattttttgggcgcgcgcaggattttgacggaagagacgattttgtaagacggataaggcgtttacgccgcatccggcagttgtacgcaggtgcctgatgcgacgctggcgcgtcttatcatgcctacgagcccgcgaatatttgcgagccgctttcccgatataaaacaacctcattgccaacctttccttttcttcttaccgttgagaaaaaggagtcgccatgtctgaatatcgtcgttattacatcaaggggggaacatggtttttcacggtgaatttacgaaatcgtcgaagccaacttttgaccacccagtaccagatgctccgtcacgccattattaaagttaagcgagacaggccttttgaaatcaacgcctgggtcgttttgccagagcatatgcactgtatctggacattacctgaaggcgatgatgatttttccagccgctggcgggaaattaaaaagcaatttacccatgcttgtggattgaaaaatatctggcaaccacgtttttgggagcacgccatccgcaataccaaagattataggcatcatgttgattatatttatataaatccagtaaagcatggttgggtaaagcaagtgagtgattggccattcagtacgttccatcgcgatgtcgcgcgagggttatatcccatcgattgggcgggggacgtaacggattttagtgccggggagcgtatcattagttaattgtgcgcagatgcctgatgcgacgctagcgcgtcttatcatgcctacaaacttgtgccggatcggtaggccggataaggcgtttatgccgcatccggcagttatgcgcagatgcctgatgcgacgctggcgcgtcttatcatgcctacaaacttgtgcctgaacggtaggacggataaggcgttcacgccgcatccggcagttgtgcaccaatgctggatacttacatcaacgcccccataatcttcaactccagctcatccggcacttcgttatacgacagcacatgcagccccggcgcaaacaaccttgcataacgcgccagcaaagggcgcagctgcggtggcaccagcagcaccgggtctttccccgccgctttcatctgctctttcacctgtggcatcgtactctggaactggttgagcatattcggatcgaccggcacgctgtcgagcatcactttcccgccctgttgcgcctgattcaccacgttggtcagcagattttccagctcattattcagcgtatacaccgtcagctcctgcttgcgaacgaacggatgggtaatgctgcgccgcaatgccaggcgcacatcggccgccagcagaatatgatctttcgtcaccgtgctactggcgaccagcacggtggcgatggtgacgatatcgcgcagggaaacgccttcggtcagcagcgcccggtacactttcagcaactggctgtaattgagcgccgcgctcaaatcttccgccagacgcggtgccgtcgacgataaacggttatgcaactgcgtaatatcatcatagttaaacaaatcaggaatatagctgcgcacaatcttatttacatgggtagcgatcacgctggcgctgtcgatcacctgataccccatattcagcgccttcgctttctgcgccgcctggatccaggtgaccggcatcccgtacgccgggtcgttcccctgcacgccgtcaatctcgccgtaggtttcgctggagggcagggccatcagtttatccgccggaatatccgcttcatcagcctttatgccgttgatgaaaatggcgtactgactgggcttaaggcggaagttttcccgaatgcggatctccggcagcagcacgccgttgccgtcagaaatcacctgccgcacgccgcgaatccgctgggtgagcgggttaccctgtgctttgtccaccagcgccaccagtttgtaaccgaggcttaaactgataggctcgatcagcggaatggtttcccaactgacctgctgctcgctggtttcggtgatggtgcgggtcagcgtttcgaggcttttctcttccgcctccgccgccagcggctgtttgctcatccgccagccggtaaaaccaagcagggcgctgaacagcaaaaacggcaggtgcggcattcccggtaccaccgccagcacgaacataatcccggtggcggtgtagagcaccgacgggcttgccagcagctggttacgcacgtcatgggcgatatcgccgttgtcgctgacgcgggtgacgataatcgccgccgcggtggagagcagcagggaagggatctgcgccaccaggccgtcgccgatggtcatcagcacatactgctggaaggcagcatcggcgctcaggttgtatttgaagatcccgatacagacgccgccgatcaggttgatcgccagaatcatcatcccggcgatggcgtccccgcgcacaaacttcgatgccccgtccatcgcgccgtagaaatcggcctcgctggcaacatctttacgccgggtttgcgcctgcgcctggttgatcaatccggcgttaagatcggcgtcaatcgccatctgtttgccgggcatcgcgtctaaggtaaagcgggcagaaacctcggaaatacgctcggcccctttggtgacgacaataaagttgattgtcaacagcgtcagtaaatccgagcgtgaaagcattatcgccgcgctgcacgggcagtcgatttttaacggtggtgggctgtcgccgttaaataaaatcagcccgtctcatccgccaaaacctgccaccgtggcggtgccggaagagacggagaaaaaagcgcgtgatgtgaatgagaaaacggcgctgctgaagaagaaatccgccaccgagcttggtgagctggcaaccagtatcaacaccattgcccgtgatgcgcatatggaagcgaatctggagatggagattgttccccagggattacgcgtgctgattaaagacgaccagaaccgcaatatgtttgaacgcggcagcgcgaagattatgccgttctttaaaacgctgctggtggagctcgcgccagtgttcgactcgctcgataataaaattattattaccgggcataccgatgcgatggcctacaaaaacaatatctacaacaactggaacctttcgggtgaccgcgcgctttcggctcgtcgggtgctggaagaggccggaatgccggaagataaagtgatgcaggtaagcgcaatggcggaccagatgctgctggattccaaaaatccgcaaagcgcgggcaaccggcgcattgagattatggtgctgaccaaaagtgcgtccgatacgctgtatcaatactttggtcagcatggggataaagtggtgcagccgctggtgcaaaagctggataagcagcaggtgctttcgcagcgaacgcgttaaatgctgaatctttacgcatttctcaaaccctgaaatcactgtatactttaccagtgttgagaggtgagcaatgcgtaaaatcattcatgtggatatggactgctttttcgccgcagtggagatgcgcgacaatcccgccctgcgcgatatccctattgctattggcggcagccgcgaacgtcggggggtgatcagcaccgccaattatcccgcgcgtaaatttggcgtacgtagcgctatgccgacagggatggcgctcaaattatgcccacatctcaccttgcttccggggcgctttgacgcctacaaagaagccagtaatcatatccgtgaaatcttcagccgctacaccagccgcattgaaccgttgagtctggatgaggcttatctcgatgtcaccgatagcgtccattgccacggttctgcgaccctcatcgcccaggaaatccgccagacaatcttcaacgagctgcaactgacggcgtctgcgggcgtggcaccagtaaagtttctcgccaaaatcgcctccgacatgaataaacccaacggccagtttgtgattacgccggcagaagttccggcatttttacaaaccttaccgctggcaaaaatccccggcgtcggcaaagtcagtgcggcaaaactggaagcgatggggctgcggacctgcggtgatgtacaaaagtgtgatctggtgatgctgcttaaacgctttggcaaatttggccgcattttgtgggagcgtagtcaggggattgacgaacgcgatgttaacagcgaacggttgcgaaaatccgtcggcgtggaacgcacgatggcggaagatattcatcactggtctgaatgtgaagcgattatcgagcggctgtatccggaacttgaacgccgtctggcaaaggtaaaacctgatttactgattgctcgccagggggtgaaattaaagttcgacgattttcagcaaaccacccaggagcacgtctggccgcggctgaataaagctgatctaatcgccaccgcgcgtaaaacctgggatgaacgccgcggcgggcgcggtgtgcgtctggtggggctgcatgtgacgttgcttgacccgcaaatggaaagacaactggtgctgggattatgatgtatactattatgtatattctggtgtgcattattatgagggtatcactgtatgcatcgaattctcgctgaaaaaagcgtcaatatcactgagttacgtaaaaacccagctaaatactttattgatcaaccggttgcggttctttctaataatcgccccgcaggatatctcttaagtgccagcgcattcgaagcgttaatggacatgcttgctgaacaagaggagaaaaagcccataaaggcgcgcttccgtccaagtgctgcaagattagaggaaattacacgccgcgctgaacaatatcttaatgatatgacggatgatgatttcaatgactttaaggaataaggatgcgggtattcaaaacaaaacttattcgcctgcaacttacagcagaggaacttgatgcgttaacggcggattttatttcctataagcgtgacggtgttttgccagatatatttggtcgcgatgcactctacgacgactcctttacctggccattaatcaaatttgagcgagttgctcatattcatctggcaaatgagaataatccatttccgccacagttgcgccaattcagcagaacgaatgacgaagcgcatttggtatattgtcagggggcgtttgatgagcaagcatggttgctcattgccattctgaaacctgaacctcataaactggctcgagataacaaccaaatgcataaaattgggaaaatggcagaagcgtttcgcatgcgtttttgaatttatattatgaataacatacaaataagaaactatcagcctggcgattttcagcaactatgcgctattttcattagagcggttacgatgaccgccagtcagcattatagtccacaacaaatttccgcctgggcgcagattgacgaatctcgctggaaggagaaactcgcgaaaagtcaagtgtgggttgcgatcattaatgcacaaccggttggttttatttcccgcattgaacattatatcgatatgttatttgttgaccctgaatacacccgccgtggggttgccagcgctttgttaaaacctttgattaagtctgaatccgaacttacggtggacgcaagcataaccgcaaaacccttttttgaacgttatggttttcagacagttaagcagcagcgcgttgaatgccggggagcgtggtttactaatttttatatgcgatataaaccgcaacattaaatccagcttgcaatgaaaataacgcccgcctggtatgtgcgcgttttctgattccacaaactgcaaggaggtaaatcatgacaaatcctttatcaatgactctttgcagacctttccaggattaattctttttttcttgccctggattcgtctgccatttcctgatttttatatttatatactctaaataattcgagttgcaggaaggcgacaagcgagtgaatcgccaggagcttacataagtaagtgactggggtgaacgaacgcagtcgcagtacatgcaacttgaagtatgacgagtataaatggaatggtacatgggcaaatatattcgtcccttatccgatgcggtatttaccatcgcatctgatgacctgtggatcgagagtttagcgatccaacaattacacaccacggcaaatttacccaacatgcagcgcgtagtggggatgccagatttacaccccggacgcggctacccgattggcgcagcgttcttctctgttggtcgtttttacccggcaagacgtcgcggtaacggtgctggaaacagaaacgggccgctactctgacacactgcgtagcgcgctggtttctctcgatggcgataacgcatgggcattaagcgaaagctggtgtggcactattcagtggatttgtccgagtccgtatcggcctcatcatgggcgcaaaaactggtttctgggcattgggcgttttaccgctgatgagcaggaacaaagcgatgcaatccgttatgagacgctgcgtagcagcgggccgggcggtcaacatgtcaataaaaccgacagcgcggtacgcgccacgcatttggcatccggtattagcgtgaaggttcagagtgagcgtagtcagcatgctaacaagcggctggcacgattgctgattgcctggaagctggagcaacagcaacaggaaaatagcgcggcgctgaaaagccagcggcgaatgttccatcaccagattgaacgtggcaacccgcgacggacatttacagggatggcttttatcgaaggataatgaaggatgaaactgccggaaggcgattaaacgccatccggcagcaaatcaaataattacttcgccggaatttctttcagcagttcagtcagcagtgtccagtaatgacctacgctttcgatgtgaacttgctcatccggagagtgtggaccggtgatagttggcccgatagaaaccatgtccatttccggatacggttttttgaacagaccacattccaggcccgcgtggataatctggatgttcggcgtcttgttgaacaggcgctgataggtttcacgtaccagatgcatcaccggagaattagcgtccggctgccagccaggatatgcgcctttcgcttcggttttcgcgccagccagtttacccaggctatccagcatgctcaccacgtagtctttaccgctgtcgatcagactacggatcaggcagtgaatttctacgttattgtcagtcatggtcaccacaccgacgttcagggaggtttcaaccacacctttggctacatcggagttacgaatcacaccgttcggggtggcgttcagcagacgaataaaggtatcgcgagatttcgcaatcagggcagctttatcgttcgctacagagtccagcaacaaggccagatttttctctttttctgccagctcgtttttcaggatctcctgataggtattcaccagagatttcaggacgtcgactttatcagctgcgacagcaatggtcgcaaaggcttcacgcgggatggcgttacgcagtgtgccgccgttgaaatcgataaggcgcagatccagttcttccgcatgacccgccaggaagcgcaccagcagtttgttggcattacccagcccaacgtggatttccccgccggagtgaccgcctttcagaccttttaaggttaacttgaaggtttcaaaaccagctggaaccgcttcacgatctaaatgcaggttggaggtgaagtcgataccccccgcacaacccatgtagatttcaccttcttcttcggagtcggtgttaatcagaatatcagcctgcaaccagttgccctgtaagccgaacgcaccgtccataccggcttcttcggtcatggtcagcagcacttccagcgggccgtgaaccacgttttcgtcagccagaaccgccagcgcagaggccataccaatgccgttatccgcacccagcgtggtgccgcgcgctttaacccattcgccatcaatataaggctggataggatctttcgtgaagtcatgcacggtgtcgttatttttctgcggcaccatatcgaggtgggcctgtaagacgaccggtttacgattttccatacctgcggtagcaggtttacgaatcaggatattacctacctgatcgcgttcgacatggaaacctttctcttttgcccaaccaacaatgtattcagcgagttgctcttcatgataggacgggtgaggaatagaacagattttggcaaaaatatcccacagcggctgtggagataattgagacagttcagacacgttaagtctccttgtcgatcacccgcaaaacagtattgcaggtcacagggttagcagaaaatgttgtcaacacaagacaggcttgcgagatatgtttgagaataccactttatcccgcgtcagggagaggcagtgcgtaaaaagacgcggactcatgtgaaatactggtttttagtgcgccagatctctataatctcgcgcaacctattttcccctcgaacactttttaagccgtagataaacaggctgggacacttcacatgagcgaaaaatacatcgtcacctgggacatgttgcagatccatgcacgtaaactcgcaagccgactgatgccttctgaacaatggaaaggcattattgccgtaagccgtggcggtctggtaccgggtgcgttactggcgcgtgaactgggtattcgtcatgtcgataccgtttgtatttccagctacgatcacgacaaccagcgcgagcttaaagtgctgaaacgcgcagaaggcgatggcgaaggcttcatcgttattgatgacctggtggataccggtggtactgcggttgcgattcgtgaaatgtatccaaaagcgcactttgtcaccatcttcgcaaaaccggctggtcgtccgctggttgatgactatgttgttgatatcccgcaagatacctggattgaacagccgtgggatatgggcgtcgtattcgtcccgccaatctccggtcgctaatcttttcaacgcctggcactgccgggcgttgttctttttaacttcaggcgggttacaatagtttccagtaagtattctggaggctgcatccatgacacaggcaaacctgagcgaaaccctgttcaaaccccgctttaaacatcctgaaaccagcacgctagtccgccgctttaatcacggcgcacaaccgcctgtgcagagcgcccttgatggtaaaaccatccctcactggtatcgcatgattaaccgtctgatgtggatctggcgcggcattgacccacgcgaaatcctcgacgtccaggcacgtattgtgatgagcgatgccgaacgtaccgacgatgatttatacgatacggtgattggctaccgtggcggcaactggatttatgagtgggccacccaggcgatggtgtggcaacaaaaagcctgtgcggaagacgatccgcaactcagtggtcgtcactggctgcatgcggctacgttgtacaacattgccgcctatcctcatctgaaaggagatgacctggccgagcaagcgcaggctttgagtaaccgcgcctatgaagaggccgctcagcgtctaccgggcacgatgcggcagatggagtttaccgtacccggcggtgcgcccatcaccggctttttgcatatgccgaaaggcgatggcccgttcccgacggtattaatgtgtggtggtctggatgcgatgcagacggactattacagcctgtatgaacgttattttgcgccgcgcggcattgcgatgctgactattgatatgccgagcgtgggcttttctagtaaatggaagctcacccaggactccagcctgttgcatcagcacgtcttaaaggcgctgcctaacgtaccgtgggtggatcacactcgcgtcgcggcctttggtttccgtttcggcgctaacgttgccgtgcgtctggcataccttgaaagcccgcgtctgaaagcggttgcctgtcttggtccggtagttcataccctgttgagtgattttaagtgccagcaacaggtgccggaaatgtatcttgacgttctggccagtcgtttggggatgcatgatgcttccgatgaagcgttgcgcgtggagctgaatcgctatagtttaaaagtgcaaggattgctgggacgtcgctgcccaacgccaatgttaagtggctactggaagaacgatccgttcagcccggaagaggacagtcgcttaatcaccagtagttctgctgacggtaaattattagagatcccatttaacccggtgtatcggaattttgacaaaggtcttcaggaaatcaccgactggatcgaaaaacgcttgtgttaaaaatttgctaaattttgccaatctggtaaaacagttgcatcacaacaggagatagcaatgacgttaccgagtggacacccgaagagcagattgatcaaaaaatttaccgcactaggcccgtatattcgtgaaggtaagtgcaaagataatcgattctttttcgattgtctggctgtatgcgtcaacgtgaaaccggcaccggaagtgcgtgaattctggggctggtggatggagctggaagcgcaggaatcccgttttacctacagttaccagtttggtctgttcgataaagcaggcgactggaagagtgttccggtaaaagacactgaagtggttgaacgactggagcacaccctgcgtgagtttcacgagaagctgcgtgaactgctgacgacgctgaatctgaagctggaaccggcggatgattttcgtgacgagccggtgaagttaacggcgtgagtgaaatgtgccggatgcatcacatccggcaatattcattaaaactgatacgtcatgccaaccgcgacaatatcatcattattaatattcaatttgttatcgctatccagttggttgattttataatcaacaaacgcactcatatttttgttgaaataatacgtagcaccgacgtcgatataattgaccagatcttcatcaccgataccttcaatatctttccctttgcttaagacataacccaggcttggacgcagaccaaagtcaaactggtattgagcgaccgcttcaaagttctgtgtcttattggcaaagccgccagttattggcgtcattttgcgtgtttcagaatagaaagttgccagataaatattattggcatcgtatttcagacctgttgcccatgcttctgcacgcttgcctgtgccacggctttgcaggttctgctcgttggtgcgatcactgttggtataggccccactaatggcgaaatcgctgccgccaaagtcatatgtcaaactcgtgccgaagccatcgccgttttgctttttaacgtcgcggttttcgtttttcccttgatattgcagggttaagttcaggccatcgataacgccgaagaagtcggtgttccgatacgtcgccagaccgctggcgcgtttggtcataaagttgtcggtctgcgcgctggaatcgccaccaaattccgggaacatatcggtccaggcttccacgtcatacaacgcccccaggttacgaccataatcgaaagaacccaaatctttatatttcaacccggcaaaagcgagacgcgttttttgctgtgcagtatcactctctgctttattaccggcaaactctgcttcccaacgaccataaccagtcagttgatcgttaatttgtgtttcgcctttgaaaccaaaacggatataactctggtcgccatctttactggcgttatcactcatataatgcatggctttaactttgccatagacatccagtttattaccgtctttattatatatttctgcagcctgtacagatgcagatgccacaatgcccatcaccactaatgccagagtgctctttttcattttcattcctgattttaattaacgcgcgaatattcagcgggagagtcccgttgaaaacaggaaagtttttaacctgagattgttaaagatatattacagattaataatattcttaaaatgtggtaatttattaaatctgtaataaaagcgtaaacaactgccgctaggcttgctgatcccgcgcaacaaaacgccatgctttgctcgcagatggttggcaaccgacgacagtcctgctaaaacgttcgtttgatatcatttttcctaaaattgaatggcagagaatcatgagtgacagccagacgctggtggtaaaactcggcaccagtgtgctaacaggcggaagccgccgtctgaaccgtgcccatatcgttgaacttgttcgccagtgcgcgcagttacatgccgccgggcatcggattgttattgtgacgagcggcgcgatcgccgccggacgtgagcacctgggttacccggaactgccagcgaccatcgccagcaaacaactgctggcggcggtagggcagagtcgactgattcaactgtgggaacagctgtttagcatttatggcattcacgtcgggcaaatgctgctgacccgtgctgatatggaagaccgtgaacgcttcctgaacgcccgcgacaccctgcgagcgttgctcgataacaatatcgttccggtaatcaatgagaacgatgctgtcgctacggcagagattaaggtcggcgataacgataacctttctgcgctggcggcgattcttgcgggtgccgataaactgttgctgctgaccgatcaaaaaggtttgtataccgctgacccgcgcagcaatccgcaggcagaactgattaaagatgtttacggcattgatgacgcactgcgcgcgattgccggtgacagcgttagtggcctcggaactggcggcatgagtaccaaattgcaggccgctgacgtggcttgccgtgcgggtatcgacaccattattgccgcgggcagcaagccgggcgttattggtgatgtgatggaaggcatttccgtcggtacgctgttccatgcccaggcgactccgcttgaaaaccgtaaacgctggattttcggtgcgccgccggcgggtgaaatcacggtagatgaaggggcaactgccgccattctggaacgcggcagctccctgttgccgaaaggcattaaaagcgtgactggcaatttcagccgtggtgaagtcatccgcatttgcaacctcgaaggccgcgatatcgcccacggcgtcagtcgttacaacagcgatgcattacgccgtattgccggacaccacagccaagaaattgatgcaatactgggatatgaatacggcccggttgccgttcaccgtgatgacatgattacccgttaaggagcaggctgatgctggaacaaatgggcattgccgcgaagcaagccagctataaattagcgcaactctccagccgcgaaaaaaatcgcgtgctggaaaaaatcgccgatgaactggaagcacaaagcgaaatcatcctcaacgctaacgcccaggatgttgctgacgcgcgagccaatggccttagcgaagcgatgcttgaccgtctggcactgacgcccgcacggctgaaaggcattgccgacgatgtacgtcaggtgtgcaacctcgccgatccggtggggcaggtaatcgatggcggcgtactggacagcggcctgcgtcttgagcgtcgtcgcgtaccgctgggggttattggcgtgatttatgaagcgcgcccgaacgtgacggttgatgtcgctagcctgtgcctgaaaaccggtaatgcggtgatcctgcgcggtggcaaagaaacgtgtcgcactaacgctgcaacggtggcggtgattcaggacgccctgaaatcctgcggcttaccggcgggtgccgtgcaggcgattgataatcctgaccgtgcgctggtcagtgaaatgctgcgtatggataaatacatcgacatgctgatcccgcgtggtggcgctggtttgcataaactgtgccgtgaacagagcacaatcccggtgatcacaggtggtataggcgtatgccatatttacgttgatgaaagtgtagagatcgctgaagcattaaaagtgatcgtcaacgcgaaaactcagcgtccgagcacatgtaatacggttgaaacgttgctggtgaataaaaacatcgccgatagcttcctgcccgcattaagcaaacaaatggcggaaagcggcgtgacattacacgcagatgcagctgcactggcgcagttgcaggcaggccctgcgaaggtggttgctgttaaagccgaagagtatgacgatgagtttctgagtttagatttgaacgtcaaaatcgtcagcgatcttgacgatgccatcgcccatattcgtgaacacggcacacaacactccgatgcgatcctgacccgcgatatgcgcaacgcccagcgttttgttaacgaagtggatagctccgctgtttacgttaacgcctctacgcgttttaccgacggcggccagtttggtctgggtgcggaagtggcggtaagcacacaaaaactccacgcgcgtggcccaatggggctggaagcactgaccacttacaagtggatcggcattggtgattacaccattcgtgcgtaaataaaaccgggtgatgcaaaagtagccatttgattcacaaggccattgacgcatcgcccggttagttttaaccttgtccaccgtgattcacgttcgtgaacatgtcctttcagggccgatatagctcagttggtagagcagcgcattcgtaatgcgaaggtcgtaggttcgactcctattatcggcaccattaaaatcaaattgttacgtaagatcttatcattctcccaccaaaaaattatcttaatgtaacagctggtgtaagtaaattctatcaacgaagatcaatcttatctactgaccaaaaaggcctgatagggcttcgctcactatacatccttggctgcaggtttagttgtacaccactcctaaatttaatgtgttggcaatgtgttcaataaagctcgaacaaattagctcattatgatcggttaatacttcaacttctggttgcatgattgtttgtccgtaaaaagataacgcgcctgccgggtagtagcaggcgcattacgcaataggtaaacaagggaggaagttcagaaatgtaaatcgggaaggttgtacgcaatgttcatcgtactacgttgttacggctttgccgcaacaagccagttgcctgccgcgctcgcagaatgtctgcagcccggagataaggagattgttcctgccagctaaatcccttcctgtcgatacgaaccagctcgtatttttctaccagaaaattcacggcatcggctagggtgataccggcatcgatagtctgtatcaggaatgttcgggttaaatatcagcaaaaagcccgcatcatgaatactggatatgaagcatgagagttacctcagtgtttatataaggattcggtccccctctctggaacggtaactctcaatctgatcggttcctgcgttagttcacatcacgactcattttttcgctctcaccggcatcccatttgccacaaaatatcccgccgtgctcctcggcagcgcttcctgtccacgaatcatatccgctattttctcgccaatcataattgtcgtggcgttcaaattcccggtgataatctgcggcataatgctcgcatccaccacacgcaggccttctaacccgtgtacgcggccttcgccgtcaaccacggacatctcgtcgtaacccattttgcaggtaccgcacggatggaaggcggtttcggcgtggttacgcacgaactcatcgagctgttcatccgtctggcattcgacaccggggctgatttcgcggccacgatactgatccagcgcgggttgatgcatgatctcgcgggtgatgcgaattgcgtcgcggaactcctgccagtcctgctcgtggctcatgtagttaaacagaatcgccggatgctggtgcgggtcgcgggatttaatccgcacatgcccacggcttgggctgcgcatactgccgacgtggcactggaaaccgtgctctttcactgcattgctgccgttatagttaatcgctactggcaggaaatggtactgaatattcggccacgcaaattcctcacggctgcgaataaatccacctgcttcaaagtggttgctggcaccaacgccagtgccgccaaacagccactccgcaccgattttcggctggttccaccactgcagggcagggtagagggaaaccggttctttgcactcatattgcagatacatctccagatgatcctgaagattttcgccgacgccgggtaattcatgcaccagcggaatatcaaactccgccagcagttcagcgttgccgacgccggagcgttgcaggatctgcggactggcaatcgcgcctgcacataacagcacttctttgttggccgttgcgcgggttgggatggtgctgtcgccttccagccattcgacgcccaccgcgcgtttgccgtcaaaaatgatgtgatcggtcatagcgtgagtacgaatggtcaggttaggacggcttttggcctgatcgagatagccacgcgcggtgctggcgcgacggccctgcggcgtgacggtgcgatccatcggaccaaaaccttcctgctgataaccgttgagatcgtccgtgcgcgggtagcccgcctgcacgcccgcttcaatcatcgcttcaaacagcggattgacgccgggtttggaggtagtgacgctcaccgggccatcaccgccgtgatagtcgttttcacccatatcgcgagtctcggccttgcggtagtagggcaggcagtcgaggtagctccagttctccagaccgggttcttgcgcccagttatcgagatccagcgcattgccacggatgtagcacatgccgttgatcaggctgcttccacccagacctttaccgcgtccgcactccatgcggcggttattcataaacggttcaggttccgtttcataggcccagttgtagcgtttaccctgtagcgggaatgccagggcagcgggcatctgggtgcggaagtcaaagcgatagtccgggccgcccgcttcaagcagcagcacggaggtattcggatcttcagtcagacgggtagcgagaacgttgccggcactgccggcaccaataatgatgtagtcaaattgcaaataaacctcctggttagaatatggactggaatttagccatctcaacctggatggacttcacctgggtgtaactctggagcgtcatcacgccgttctcgcgaccaatgccggagtgtttgtagccgccaacgggcatctctgccggggattcgccccaggtgttgatccagcaaatacccgcttccagctgatgaatgacgcgatgcgcgcggttcaggtccgctgtcacgatgcccgccgccaggccgtagtcggtatcgttagcgcggcgaatgacttcgtcttcgctctcgtaggtcagaatggacatcactggcccgaagatctcttcacgcacgatggtcatatcgtcgctgcaatcggtgaacactgtcggtgcaacccatgcgccgttatcgaagccatcgcctttcagtacatcgccgccgcacagtacgcgcgcgccttcctctttgcctttggcgatatagcgcagcacgttatcgcgatgcgggaagctgaccagcgggccgaagttagtttgcggatcgaaaacgtcgcccgcgcgaatgcgctcaacgcgcgccagaattttctgctcaaatgcggctttgcatttcgccggaacgaagacgcgggtgccattggtacacacctgaccggagctgaagaagtttgccatcatggcgatatcggcggcgagatcgagatccgcatcatcgaaaacgatcagcggacttttaccgcccagttccatggtcacttctttcagggaagaggccgcgctgttagccatcacttttttgccgctggcgacaccgccggtaaaactcactttggcaatgcccggatgctcggtcagatattgcccggtctccgcgcccacgcccggcaacacgttaaatacgccgtccggcaggcccgcttcgctgtaaatttcagccagctttaacgcggtaagcggggtaacttcgctcggtttgaaaatcattgcgttgcctgccgccagcgccggggcggatttccacagggcaatctggatcgggtagttccatgcgccaatccctgccactacgcccagcggttcgcggcgggtatacacaaaggacgtttcacgcaacgggatctggctgccttccagcgccgggatcagcccggcgtagtactccagcacgtccgcaccggtaacgatatcgacggtactggtttcgctatatgcttttccggtgtcgagggtttccagttttgcgagttcgtcattgcgttcacgcagaatatcaacggcccgacgcagaatacggctgcgctccatggcggtcatgctcgcccagattttttgcccctgctgggcgcttttcacggcgcgatcgacatcctcgcgcccggcggcctgcacggtcgccagcacgttaccgttggccgggttaatggtctcgaaggtgcgaccgctggtggcggaggtataaccaccatgtatataaagctgctgttctgccattcgggacatcacgtctcctcggttaatcggtgggtagatgctgagtgataaagtggcgggtcagggaattagcgcgggttttatccagcggtttgccgctcagagccgcgcgcagccataatccatcaatcagcgcggccaggccgtagcccgcttcctgtgcctgttcgcgcggcaattcgcgacgaaactcgctcaccagattgctcagcaagcggcggctgctgacctgctgtaaacgatagagcatcggctgatgcatactgctggcccagaacgccagccaggctttcatcgccgcactgctcacctgcgtttcatcgaagtttccgccaacaatcgcctgtaatcgctgctctgcactgccctgcggaagtgcatgtaatcgattcaaaaccgcgtcacgcagctgactggtgatatcgcgcatggttgcttccagcagaccatttttgtccctgaaatagtggctgatgatccccgtagaaacgcctgcacggcgggcgatctgcgcgatcgttgcatcgtgcatgcccacttcatttattgcttccagtgtggcgtcgatcagttgtctgcgccggatgctctgcatccccaatttgggcattttcgccactccattcatcagcggtgtttatctattaaagcggttattgattggacgttcaatataaaatgtgtcttaattgttacgaatttgattttaaatagtaacaataacagtggggatactggatgacagaccttagtcacagcagggaaaaggacaaaatcaatccggtggtgttttacacctccgccggactgattttgttgttttccctgacaacgatcctgtttcgcgacttcagcgccctgtggattggccgcacgctggactgggtttctaaaaccttcggttggtactatctgctggcggcaacgctctatattgtctttgtggtctgtatcgcttgtagccgttttggtagcgtgaagctcgggccagaacaatccaaaccggaattcagcctgctgagttgggcggcgatgctgtttgctgccgggatcggtatcgacctgatgttcttctccgtagccgaaccggtaacgcagtatatgcagccgccggaaggcgcgggacagacgattgaggccgcgcgtcaggcgatggtctggacgctgtttcactacggcttaaccggctggagcatgtatgcgctgatgggcatggcgctcggatactttagctatcgttataatttgccgctcaccatccgcagcgcgctgtacccgatcttcggtaaacggattaacgggccgataggtcacagtgtggatattgcagcggtgatcggcactatcttcggtattgccactacgctcggtatcggtgtggtgcagcttaactatggcttgagcgtactgtttgatattcccgatagcatggcggcgaaagcggcactgatcgccttgagcgtgataatcgccacgatctctgtcacctccggtgtcgataagggcattcgcgtgttaagcgagcttaatgtcgcgctggcgctgggattgatcctgttcgtattgtttatgggcgacactagcttcctgcttaatgcactggtgctgaatgttggcgactatgtgaatcgctttatgggcatgacgctcaacagttttgccttcgaccgtccggttgagtggatgaataactggacgctcttcttctgggcatggtgggtggcatggagcccgtttgtcggcttgttcctggcgcgtatcagccgtgggcgtaccattcgccagttcgtgctgggcacgttgattattccgtttaccttcacgctgttatggctcagcgtgttcggcaatagcgcgctgtatgaaatcatccacggcggcgcggcatttgccgaggaagcgatggtccatccggagcgcggcttctacagcctgctggcgcagtatccggcgtttacctttagcgcctccgtcgccaccattactggcctgctgttttatgtgaccagcgcggactccggggcgctggtgctggggaatttcaccagccagcttaaagatatcaacagcgacgcccccggctggctgcgcgtcttctggagcgtggcgattggcctgctgacgctcggcatgctgatgactaacgggatatccgcgctgcaaaacaccacggtgattatggggctgccgttcagctttgtgatcttcttcgtgatggcggggttgtataaatctctgaaggtagaagattaccgccgtgaaagtgccaaccgcgataccgcaccgcgaccgctggggcttcaggatcgcctgagctggaaaaaacgtctcagccgcctgatgaattatccgggcacgcgttacactaaacagatgatggagacggtctgttacccggcaatggaagaagtggcgcaggagttgcggttgcgcggcgcgtacgtggagctaaaaagcctgccaccggaagagggacagcagttgggtcatctggatttgttggtgcatatgggcgaagagcaaaactttgtctatcagatttggccgcagcaatatagcgtgccgggctttacctaccgcgcacgcagcggtaaaagcacctactaccggctggaaaccttcctgttagaaggcagccagggcaacgacctgatggactacagcaaagagcaggtgatcaccgatattcttgaccagtacgagcggcaccttaactttattcatctccatcgtgaagcgccgggccatagcgtgatgttcccggacgcgtgattgttattgcataaaaccgcgccatgtctgcatatggcgctgtttctcctacctcttgatacgttatatctatacggttaagcccttagtatctattgatgattaccagacaacagataataaaaaagaaaagaactattgcagcccaaaacctacatttgggctgttgcgaatgttcaataagtttagtcttatttaatgtaaatattgctgatcatttgaaatgacgcattattcatgagaaatgtgtatcgtaaatcaactgaaattaacgcaaccatttgttatttaaggtttaattatctgtgtgtgatattttattgaatgttttaaatattgtttttattggcattgctataatattggttatcatttgctgaatggattcagtcttaatgagtgggtttttaagggacaggcatagagtaatgatacgtatgcataaccaacatctttactcattatgtcattgaatgttgacgctatgtgtttatgagggagaggtattttcagttgatctggattgttaaattcatataatgcgcctttgctcatgaatggatgccagtatgtagtgggaaattataaatattgaaatagtccaactacttctttattaccaaaaatgagtatctgaattttaatattgcattcttgcgtgattatctcctgagtttgacttgtgattacctttttaaggtatttagcgtaactgtttttgagcgagcatcagaggtaaagataatcttcttgatagtgatgtgggatgttatacgtatggcatcgctgatgtttatggttaccccttatgtgtgctcaggaatcgacaggtaatcactcatactgaacagcgataaaagataaaggtgtgttcatgaatagttgtgattttcgtgtttttctgcaagagttcggtacaacggttcatttgagtttgcctggtagcgtatccgagaaagaacgactgctactcaagctgctgatgcagggaatgtctgtaacagaaataagtcagtacagaaatcgcagtgcaaagacaattagtcatcaaaagaaacagctctttgagaaactggggattcagagcgatattactttctggcgcgatattttctttcagtacaatccggagatcatatccgccacggggagtaatagtcacagatatattaatgataatcactatcaccatatcgtcacgcctgaagccatcagtctggcgttggaaaaccacgaattcaaaccgtggatccaaccggttttctgcgcgcagactggcgtactgacgggctgtgaggtgcttgtccgctgggaacatccacaaacgggaattatcccaccggatcagtttattcctctggcggagagttccggtcttattgtcataatgacccgccaactgatgaaacagactgcggatattctgatgccggtaaaacatttgctgccggacaatttccatattggcatcaacgtcagcgcgggttgttttttggcagcgggatttgaaaaagagtgtctgaacctggttaataaattaggtaacgataaaatcaagctggttctcgagctaacggaacgtaaccctattccggtaacgccagaagccagagcgatatttgacagccttcatcagcacaacattacctttgcgctggatgactttggtacgggttatgcgacctatcgttacttgcaggcgttcccggtcgattttattaagatcgataagagttttgtgcaaatggcgagtgtcgacgaaatctccggtcatattgtggacaatattgtcgaactagcgcgtaagcctggtctgagtatcgtggcggaaggggtagaaacccaggagcaggcggatttaatgatcggtaaaggcgttcactttttgcagggctatttgtactctccgccagtaccgggtaataaatttatctctgaatgggtaatgaaagcaggtggttgatgtaaaccgctattcacagcgcatcgggaggttggcagcgattaattctcccgatgcagtaaatcctgatagatccccgttaatatgccatttggcgcaaattgttttttaatccactgcgtcacctgacccgtagcagaatgctgagtcgccagtaacatgcggctatcctggcgcggattatggatttgtcgggtaaccagcagggattgcgtcatcgcctcacggaccatgtaatccggcaaaaaaccaattccttcacctaaaatctggcactgacatttggtgttgaaatctggcaccagaatactctcctgcccgtgcagcaaccagcccacttttttattaatcgtatgcgcggtgtcctccaccataatattagggtagagacgcagttggctttcggcgatgggttccggcacaaaggctaacgggtgatccggggcgatagcaaaagcccagcgaatcgcgccaatttcagtgtaatcaataccgccgccgtccagtagtgtatcgggtgcgccgatggcgatattggcctgattattaataatcgcatcccagacgccgttatacacttcggtggtgacggtaatctggcaggtaggaaactgctttttcagcacctgtaacaagcgtgcggtgtgtttgggcgtataaagcagctgattaatacaaatgcgcacacgcgcttctatgccctggctaatagtatcgattctgcgtttgatggcataaaaatcattcagcaggtcggtagctttgcggaaaaaataacgcccggactccgttaactcaatgctgcgggtactgcgagtgaacagcaccacatccagccccgtctccatacgcttaatggtgtagctaatggcggaagtggttaaacccaactcttctgcggctttactgaagctgccaaaacgcgcagcggtagtaaatgccaacagattctcttcggtaaaaatactgttcattaaaccattctcgccattatctactatgaatttctccagctatgactgtagaggtatcggttaaagatagataatcatttttgaataacttttaatacccgtcgcgtttagtcgtcgcttcgcttaatttttgtccaccatattcactaattacccccacgcagttacccgccagaaaacccagtaacgtcaccgtccagttcatcccgctggcaaaaaacagcgtcatgccgagaaagccaccgggaataaaggacagtaaccagaaacgcccttgccagaccactaccgcgctgaagggtacggtagtaattacgctcgcccagaacgcggacagtccacttacagaggccagccaaccagcagtcagcgcggcgaaaaacgcccacaccatcccggaataattaaccgccagacttctgataaacccgcttttaccgccgcctgcggcataaaaactgcaaaaggcgacgaagccaatggttcctaataattcccatccttgagagagcccgacatgactagacactaactgccaaagccctgcacaaataccgacggtgacacccgttgccgtgagtccgttcatcttgttcccctctggttagacatggacgaaagctactcttacatgtgcagactatagagaaataaaacctgattgagtgaaagggtatcgggtcaaagaaacaaatattgcactaccgcacactgcgaaaagattgttgaatattattcaacaaaaaggcgagatacggcgaattaaatttaagcgggttcttttatcagattatcgttgctattctcaattcatcgaaaacagccacaaaaaccaggggaatgtgaatgagtataaaaaatctacctgccgactatttattggctgcacaacagggtgatatcgataaagtaaaaacctgccttgcgctgggtgtcgatattaatacctgcgatcgtcaggggaaaacggcaattacgctggcaagtttatatcagcaatatgcttgcgttcaggcattaattgatgccggagcggatattaataagcaagattatacctgtttaaatccttttttaattagctgtctgaacgatgatttaacgctactacgaattattttaccggctaaacccgatcttaattgcgtaacccgttttggcggtgtcggcctgacgcctgcctgtgaaaaaggccatttaagtattgtaaaagagcttttggcgcatacggagattaacgttaaccagaccaaccatgtaggctggacgccgctactggaagcgattgtgcttaatgatggtggtattaaacagcaggcgattgtgcagttattgctggaacacggtgccagcccgcatctgaccgataaatatggcaaaacgccactggaactggcgcgggaacggggctttgaagagattgcgcagttactgattgccgcaggtgcataaaccgggaggcttgctatcaacacaccagaaagacggtgtgtgtgggcgctaactgcggatgcggattttctggcgcagcgggggcaaggacaggttgaacaggtctttgccagagcggtaaatatcgcactcccggctcgccagcagttgctgacgctgctttgtgaagagtacgacaatgcgccaaacagttgtcggttggcactcactcactttgatgatctgttccggcatggtgataaggttcagtttgacgatcaaggtattacggttggtcaacatcttcatatagagatgagtcgttgtcggcgttggctgtccccaaccttgcaaatgaccgctgtgaattttcaccttatcgcctggctacagtggcacgacattattcatcagcacctgggggaaaatgaaaccctgtttaattatcgcggcgataatccgttttatcaggcgttaaataaagaattacatattaaacgacgggcagttattcaggccgtaaacgataaacaaaatatcgccagtgcggtcgccagtatgatggggttagggattggccttacgccaagtgccgacgattatttaacaggtctggcgcttattttatttattcccgggcatccggcggaaaaatacaaagaggaattttatctcggtctgcaacgcggcaaaaataataccacattattaagtgccataacgctggaagccgcattacaacaacgctgccgggaaaatattcatcgttttattcacaacattatttatgacatccctgggaacgcaactcaggcaatagaaaaaattaaacatattggctccagttccggctgcgacatgctgtatggcatggccgatggttgtgcgctgagccaaacctacggagggaattatgtcagttaattaaccaaacctacggagggaattatgagtgttaaaatagtcattaaaccgaatacctattttgattctgtcagcctgatgtctatctccacgcgtgcaaataaactcgacggcgtcgagcaggcatttgtggcgatggcgaccgaaatgaataaaggcgtgctgaagaatttaggactgctgacgccggagctggagcaggcgaaaaacggcgacctgatgattgtcatcaatggtaaaagcggtgcggacaacgagcagttactggtggagattgaagaactgttcaacaccaaagcgcaaagcggcagccacgaggcgcgttacgccactattggcagcgccaaaaagcatatcccggaaagtaacctggcggtgattagcgtcaacggtctgtttgccgctcgcgaagcgcgtcaggcgctgcaaaacgatctcaacgtgatgctgttttccgataacgtcagtgttgaagatgaactggcgctcaagcaactggcccacgaaaaagggctgctgatgatggggccagactgtggcacggcgattatcaacggcgcggcgctctgttttggtaacgccgtgcgtcgcggcaacatcggtattgttggcgcatccggcaccggcagtcaggagttgagcgtccgcattcatgaatttggcggcggcgttagccaactgattggcaccggcgggcgcgacctgagcgagaaaatcggcggcctgatgatgctcgacgccatcgggatgctggaaaacgatccgcaaactgaaatcattgcgcttatctccaaaccgcctgcgcctgcggtggcccgcaaagtgctggaacgtgcgcgcgcctgccgcaagccggtggtcgtctgcttcctcgatcgtggcgaaacgccagtggatgagcaggggctacagtttgcccgcggcaccaaagaggcagcgctaaaagcggtgatgctctccggcgtgaaacaggaaaatctcgacctgcatacgcttaaccagccgttgattgcggatgtgcgtgcgcgtctgcaaccgcagcagaaatacattcgtggcctgttctgcggcggcacgctgtgcgacgaaaccatgttcgcggtgatggaaaaacatggcgatgtctacagcaacattcagcccgatccggaattccgcctgaaagatatcaaccgcagcatcaaacacaccttcctcgactttggcgatgacgacttcaccaatggcaagccgcacccgatgattgaccccaccaaccgcatcagtcgcttgatcgaagaggcgcgcgatccagaagtggcggtgatcgtgatggattttgtgctcggatttggaagccatgaagatccggtcggctccaccatcgagacgatcaaagaagcgaaagcgatcgccgctgccgaaggacgcgagttgatcattctcgcctatgtgctgggtaccgatcttgatacgccaagcttagaacaacaaagccagatgctgcttgatgccggagtgattctggcgagcagcagcaccaataccggattgctggcgcgtgaatttatctgcaaaggggaggaagcctgatgagccagagtctgtttagccaaccattgaacgttattaacgtcggcatcgccatgtttagcgatgacctgaaaaagcagcatgtagaagtgactcaactcgactggacgccgccggggcagggcaatatgcaggtggtgcaggcgctggataacattgccgatagcccgctggcggacaaaatcgccgccgctaaccagcaggcgctggagcgtattatccagagccatccggtgctgattggttttgatcaggcgattaacgtggtgccgggcatgacggcgaaaaccattcttcacgccgggccgccgatcacctgggaaaaaatgtgcggcgcgatgaaaggcgcggtcaccggagcgctggtgttcgaaggactggcgaaagatctcgacgaggcggctgaactggcggcttccggggagatcaccttcagcccgtgtcacgagcacgactgcgtgggaagcatggcgggtgttaccagcgccagcatgtttatgcacatcgtaaaaaacaaaacctacggcaacatcgcttataccaacatgagcgagcagatggcgaagattttgcgtatgggcgctaacgaccagagcgtgattgaccgcctgaactggatgcgtgatgtgcagggaccaatactgcgcgacgcgatgaaaattatcggcgaaatcgatctgcgcttaatgctggcgcaggcgctgcatatgggcgatgagtgccataaccgcaataacgccgggacgacactgctgattcaggcgctgacgccggggattattcaggcgggttattccgtcgagcaacagcgcgaagtgtttgagtttgtcgccagcagcgactacttctccggcccgacgtggatggcgatgtgtaaagcggcgatggatgcggcgcatggcatcgaatacagcaccgtggtcaccaccatggcgcgtaacggcgtcgagttcggcctgcgggtcagcggcctgccggggcaatggtttaccggcccggcgcagcaggtgatcggcccgatgtttgccggttataagccggaagatagcgggctggatatcggcgacagcgccatcaccgaaacctacggtattggcggatttgctatggcgaccgcgcccgctatcgtcgcgctggtgggcggcacggtggaagaagctattgatttctcccgtcagatgcgcgaaatcaccctcggtgaaaaccccaacgtcaccattccgctgctcggttttatgggcgtgccgagcgcaatcgacatcacccgcgtgggtagcagcggcattctgccggtgatcaacaccgccatcgcccataaagatgcgggcgtcggcatgattggcgcgggcattgtgcatccaccttttgcctgcttcgagaaagccattcttggctggtgcgaacgttacggcgtctgacctacatgttcatgccggatgcggcgtgaacgccttatccggcctacgaatggcgcaagaatctgtaggcctgataagcgtagcgcatcaggcatttgtcaccattgccggatgcggcgtgaacgccttatccggcctacgaatggcgcaagaatctgtaggcctgataagcgtagcgcatcaggcatttgccaccactgccggatgcggcgtggacgccttatccggcctacgagtggcgcgagaatctgtaggcctgataagcgtagcgcatcaggcatttgtcaccattgccggatgcggcgtgaacgccttatccggcctacgagtggcgcgagaattgtaagcctgataagcgtagcgcatcaggcagtctggcgttggtcataaccccatcaccctctgtagcggacataacaacatgaaagagcttgtggtcgttgccattggtggcaacagcattatcaaagataacgccagccagagcattgagcatcaggcggaggcggtgaaagccgtcgccgatacggtgctggaaatgctggcttccgattacgacattgtgctgacccacggcaacgggccgcaggtcgggctggatttacgccgtgcggagattgcccacaagcgcgaagggctgcccttaacgccgctggcgaactgtgtggcagatacgcagggcggcatcggctatctgatccaacaggcgctgaataaccggctggcgcgtcacggcgagaagaaagccgtcaccgtggtgactcaggtggaagtggataaaaacgatccaggttttgcccatcccaccaagcccatcggcgcattctttagtgacagccagcgtgacgaattacaaaaggcaaaccctgactggtgttttgttgaagatgccgggcggggctatcgccgcgtggtcgccagcccggaaccgaaacgtattgtcgaagcacctgccattaaagcgctgatccaacaaggttttgtcgtaattggcgcgggcggcggtggaattccggtagtgcgtactgacgcgggagattaccaaagcgtggacgcggttatcgacaaagatctctctaccgcgctgctggcccgtgaaattcacgccgacattcttgtgatcaccactggcgtcgaaaaagtgtgtattcactttggcaaaccgcagcagcaggcgctcgatcgggtggatattgccaccatgacccgctatatgcaggaagggcatttcccgcccggcagcatgttgccaaaaatcatcgccagcctgacatttttagaacaaggcggcaaagaagtgattatcaccacgccggaatgcctgcctgcggcgctgcgcggcgaaacgggcactcatattattaaaacgtaaggacgtaagatgaaagaaagcaatagccgccgtgaatttctgagccagagcggtaagatggtcaccgccgccgcgctgtttggtacctctgtgccgctcgcccatgcggcggtagctggcaccctaaactgcgaagcgaacaacaccatgaaaatcactgacccgcattactatctcgataacgtgctgctggaaaccggttttgactacgaaaatggcgtggcggtgcagacccgcacggcgcgccagaccgtggagattcaggacggcaaaattgtcgccctgcgcgagaacaagctgcatccggacgccacgctgccgcactatgacgctggcggtaagctgatgctgcccaccacccgcgacatgcatattcatctcgacaaaaccttttacggcgggccgtggcgcagcctcaatcgtccggcaggcaccaccatccaggacatgatcaaactcgagcagaaaatgctgccggaactgcaaccgtacactcaggagcgggcagaaaaactgattgatttattgcagagcaaaggcaccaccattgcccgcagccactgcaatatcgaaccggtttccggcctgaaaaatctgcaaaatttgcaggcggtgctggcgcgacgtcaggcgggctttgagtgtgaaatcgtcgccttcccgcagcacggtttgctgctgagcaaatctgaacctttaatgcgtgaagcgatgcaggcgggggcgcattacgtcggcggcctggacccgaccagtgttgatggcgcgatggaaaaatccctcgacaccatgttccagattgcgctggactacgacaaaggcgtcgatattcacctgcacgaaaccactccggcaggcgtggcagccatcaattatatggttgaaacggtagagaaaacgccacagctgaagggcaagctgaccatcagtcacgcctttgcgctggcaacgctcaacgagcaacaggtagatgaactggcgaaccggatggtggtgcaacaaatttctatcgccagcacggtgccgattggcacgctgcatatgccgctcaaacagttgcacgacaaaggcgtaaaagtgatgactggcactgacagcgttatcgaccactggagcccttatggtctgggcgacatgctggaaaaagccaatctgtacgcgcagctctatattcgtcctaacgaacagaacctctcccgcagcctgtttttagccactggcgatgtattgccgctgaatgaaaaaggcgagcgtgtatggccaaaagcgcaggatgacgccagctttgtgctggtggacgcctcctgttccgccgaggcggtggcgcgtatcagcccgagaaccgcaacgttccataaagggcaactggtgtgggggagtgtggcaggttgatgcgcatttgaaacgcctgcaacggtgaatagtaagagatttaagccccagggagtggggcaatctgaatatgagtgtgtcggcagaaatggacattatctttgaggaatatgcccttattgacgttgtgtagataactatttgtctacgtgaaaagatcatcagttttgccgattttagtcttttacagatagcaaatatcacacttacaggcgctcgccttatggggaacgttgctgctctgtttcattcaggctcgcggcatgttggggctggatcgggtggtttaaatattggctatattcaatggacgcgttttgccgcgatgacatatcaggcgttgccaaatacacatagctaatcaggagtaaacacaatgaagatcaaagctgttggtgcatattccgctaaacaaccacttgaaccgatggatatcacccggcgtgaaccgggaccgaatgatgtcaaaatcgaaatcgcttactgtggcgtttgccattccgatctccaccaggtccgttccgagtgggcggggacggtttacccctgcgtgccgggtcatgaaattgtggggcgtgtggtagccgttggtgatcaggtagaaaaatatgcgccgggcgatctggtcggtgtcggctgcattgtcgacagttgtaaacattgcgaagagtgtgaagacgggttggaaaactactgtgatcacatgaccggcacctataacagcccgacgccggacgaaccgggccatactctgggcggctacagtcaacagatcgtcgttcatgagcgatatgttctgcgtattcgtcacccgcaagagcagctggcggcggtggctcctttgttgtgtgcagggatcaccacgtatagcccgctacgtcactggcaggccgggccgggtaaaaaagtgggcgtggtcggcatcggcggtctgggacatatggggattaagctggcccacgcgatgggggcacatgtggtggcatttaccacttctgaggcaaaacgcgaagcggcaaaagccctgggggccgatgaagttgttaacagtcgcaatgccgatgagatggcggctcatctgaagagtttcgatttcattttgaatacagtagctgcgccacataatctcgacgattttaccaccttgctgaagcgtgatggcaccatgacgctggttggtgcgcctgcgacaccgcataaaagcccggaagttttcaacctgatcatgaaacgccgtgcgatagccggttctatgattggcggcattccagaaactcaggagatgctcgatttttgcgccgaacatggcatcgtggctgatatagagatgattcgggccgatcaaattaatgaagcctatgagcgaatgctgcgcggtgatgtgaaatatcgttttgttatcgataatcgcacactaacagactgaaaaaattaataaataccctgtggtttaacatattaacttcgctctccacttaactttttagttaaggagagcgaaataatatcaaagtagcagtaaaacctataacgtaaatttaaattgttaaattaacgccctccagtacacaatacttcacacgttagttatgagcgatttctgatagtgcctggtttaatcagagctttattatctgcgacgtttatttttatttaagagagatcgcgatgataagtttaaaagctccgcacaataatttgatgccatatacgcaacaaagcatacttaatacggttaaaaacaatcagttaccagaggatatcaaaagctccctggtttcctgtgtcgatatattcaaggttttgattaaacaatattatgattatccttatgattgtcgtgatgatttagtcgatgacgacaaactcattcatctcatggctgccgtacgagactgtgagtggagtgacgataacgcactcaccataaatgtgcagtttaatgatttccctggattttatgactggatggattaccctgatcacccggttaagtttgtttttcacatacttgaaaatcaaaaagggacagtttgggtatatgaccaggatgatgcgtttcttgatattaaagcaaacgtgcaggctggacgctttaccgggcttaagaaattagtgcagtttatcgatagtgtgcgaacagattgcaaatgtattcttcttgaataccatatgcctttgctgagaattttccctaaagggaaagagtgtatgcatgtggaaaaatggcttcgcgaaatgagctctattccggagacagacgcgcccattaagcaggcgcttgcgcatggattattattacacttaaaaaatatctaccctgtttttcctgaaagtctggtgatgttattgctctctgttctggacgtaaaaacatacagagatgatgcgcgattaaatgaatggatatctaatagagtgcaggaattaggtgacagatattatcctgtaaataagcacgttaaaatccgctacactctttaattcagaaagggttccacctgcaagttgttattccacctgagagtgaatcgcaatgcaggtaatcatttcatctgtatatctgtatgccaactggcattccatctcttttttcgccgatattttgttgtgatcggcgacacttcgcttaaaaaagcaccagtagtggtttcgcagccatgcggtgtataaaaaatgatctcatgcagatgttttgtgaatgtgttggttgacattcatatgaaaaaaatcataattccatcatgtttgtgtggggtcttttctgtatcttacgcatcgcactcaagcctgacagaaaatatgctgtaaggctcatatcaaaaaccgccattagctcatcaggaagagcagacgacaaccaggattgttgtatggtacggggttcgaggcctcgatggcggtccaacttttcaaaactcttctgaatcagatccccttattaagttccctgcaaagtggaacattgccattgtttggctatagtggatggggcagaccaatgaaaaaagcccacacaggggagagtgggctgaaatgggaagctaaagacagtagtaaacttatcggaaataaggaccacgcattacgggggctaagtagcccgatggccgtgattcggcaaatcaggttgattacgtaaagagtaaattatctgctcaccgctgcgtcaccccttcgtaaatcaggcgtagcgcgaatacaccaataattgcaccaataacccgactggcaacgcgttgcatacgcccataagcacgacgcacagcgggcaaagaaaacgcctgactaagaaaaactcgccagataatacttgcgagcacaatccccgcccaggccattaaacgtgcccatgttggtgtttctgcatttaatgttacactgaaaatactgataaaaaataaaacggtttgcgggttagagagatcggtaattaatccgcggcgaaaaaagacataccagggggcgctaatcggttgttgtagtgtgctcatttgcggtgtactctggcggcgcatgctgcaccacgcaaaccataagagataagcgccgccgacgattctgataaggctaaaaatctcctcacactgcgtaattagcgttgcaagaccaaacaaacccaacccggaataaaatgcatcgcccagcgccacgcccagcccggtcagcacccctgcgcgtcgaccggaagccaggctggtttgtactaccacaaagagattggctcccggattaaaaaaagtaatcacgaacagtcctacggtcaggtaaacggcatgcaaaggatccatagtgatttcatccataaataagtgaactaactgcatcatatttctaccaaaaataatcgggtgcgagagagatcacaaagtgtcttatttccggttactggcgtttatgccctgactgaactaattattaatcaacccaataatgtgggtgggtgatagtgtgataacaactctggagccgtaatatgaaaataatctctaaaatgttagtcggtgcgttagcgttagccgttaccaatgtctatgccgctgaattgatgaccaaagcggaatttgaaaaagttgaaagccagtatgaaaaaataggtgatattagtaccagcaatgaaatgagcactgcagatgcaaaagaagatttgatcaaaaaagcggatgaaaaaggggctgatgtgttggtactgacctccggtcaaactgacaataagatccacggcacggcaaatatttataagaagaagtaattctgaatcctatgtaaacatctccgatgcgtaagtttatcggtgatcatctattgaaatttatgccggataaagcgttcgcgctgcattcggcagttcagcttttcagccgccgccagaacgtcgtccggctgatgcctaaataattcgccgctgctgttttatcgccattaaatttctccagtgcctgttgtggtgtcagtaagcgtggagcgggagttttcgcgctctcgcgcgccagttccggcagtagcagttgcataaactgcggcgttaaatccggcgtcggttccacacttaaaaacagcgccagtcgttccatcatattgcgcagttcacgaatattgcctggccagtcgtagtgcagcagcacagtttcacttgcctgtaacccctggcgtaatgcagcagaaaatggggcggagagcgccgccagagacactttcaaaaagctttccgccagcggaagaatatccgccacccgctcgcgcagtggtggcaattgcagacgcaaaatactcagccgataaaacagatcacggcgaaaacgtccttgctgcatatcttcttccagattgcagtgagtggcgctaatgacccgtacatctaccggaacaggctgatgcccgccgacgcgggtgacctctttttcttccagcacccgcagcagccgggtctgcaaaggtagcggcatttcgccaatctcatccagaaacagcgtaccgccgtgggcaatttcgaacagcccggcgcgacctccgcgtcggctgccggtaaacgccccttcctcatagccaaacagttctgcttccagcaggctttcggcaatcgccccgcagttgacggcaacaaacggatggctctttttgccctgtcgcgcatcgtggcgggcaaaatattcccgatgaatcgcctgggccgccagctctttgcccgtccccgtttccccctcaatcaacaccgccgcactggagcgggcatacagcaaaatagtctgccgtacttgttccatctgtggactttgaccgagcatatcgcccagcacgtaacgagtacgcagggcgttgcgggtggcatcgtgagtgttatggcgtaagctcatgcgcgtcatatccagcgcatcgctgaacgcctggcgcacggtggcggcggaatagataaaaattccggtcattccggcttcttctgccaaatcggtaatcagccctgcgccgaccaccgcttcggtgccgttagcttttagctcgttaatctgcccgcgtgcgtcttcctcggtaatgtagctacgttggtcgaggcgcaaattaaaggttttttgaaacgccaccagcgctggaatggtttcctgataggtgacaacgccgatagaagaggtgagttttccggcttttgccagtgcctgtaacacatcgtagccgctcggtttaatcaaaataactggcacactcaggcggcttttcaggtacgcgccgttagagccagccgcgatgatggcgtcacagcgttcgtttgccagtttcttgcggatgtaggtcactgctttttcaaagccaagctgaataggggtaatgttcgccaggtgatcaaactcgaggctgatatcgcgaaacagctcgaacaggcgcgttacagataccgtccagataaccggtttgtcgtcattaagccgtggtggatgtgccatagcgcaccgcaaagttaagaaaccgaatattgggtttagtcttgtttcataattgttgcaatgaaacgcggtgaaacattgcctgaaacgttaactgaaacgcatatttgcggattagttcatgactttatctctaacaaattgaaattaaacatttaattttattaaggcaattgtggcacaccccttgctttgtctttatcaacgcaaataacaagttgataacaaaggatgggctatgtctctacactctccaggtaaagcgtttcgcgctgcactgactaaagaaaatccattgcagattgttggcaccatcaacgctaatcatgcgctgttggcgcagcgtgccggatatcaggcaatttatctttctggcggtggcgtggcggcaggtagcctggggctgcccgatctcggtatttctacccttgatgatgtgctgaccgacattcgccgtatcaccgacgtttgtagcctgccgctgctggtggatgcggatatcggttttggttctagcgcctttaacgtggcgcgcaccgtgaaaagcatgattaaagccggtgcggcaggattgcatattgaagatcaggttggtgcgaaacgctgcggtcatcgtccgaataaagcgatcgtcagcaaagaagagatggtggatcggatccgcgcggcggtggatgcgaaaaccgatcctgattttgtgatcatggcgcgcaccgatgctctggcggtagaggggctggatgcggcgatcgagcgtgcgcaggcctatgttgaagcgggtgccgagatgttgttcccggaggcgattaccgaactcgccatgtaccgccagtttgccgatgcggtgcaggtgccgatcctcgccaacatcaccgaatttggtgccacgccgctgtttaccaccgacgaattacgcagcgcccatgtcgcaatggcgctgtacccacttagtgcgttccgcgccatgaaccgcgccgctgaacatgtctacaacgtcctgcgccaggaaggcacgcagaaaagcgtcatcgacaccatgcagacccgcaacgagctgtacgaaagcatcaactactaccagtacgaagagaagctcgacaacctgtttgcccgtagccaggtgaaataaaaaacgcccgttgattgtattcgacagccgatgcctgatgcgtcgctgacgcgacttatcaggcctacgaggtgcactgaactgtaggtcggataagacggatggcgtcgcatccgacaaccgatgcctgatgcgccgctgacgtgacttatcaggcctacggggtgcactgaactgtaggtcggataagacgcatagcgtcgcatccgacaaccgatgcctgatgcgccgctgacgcgacttatcaggcctacggggtgcactgaactgtaggtcggataagacgcatagcgtcgcatccgacaaccgatgcctgatgcgccgctgacgcgacttatcaggcctacggggtgaactgaactgtaggtcggataagacgcatagcgtcgcatccgacaacaatctcgaccctacaaatgataacaatgacgaggacaacatgagcgacacaacgatcctgcaaaacagtacccatgtcattaaaccgaaaaaatctgtggcactttctggcgttccggcgggcaatacggcgctctgcaccgtgggtaaaagtggcaatgacctgcattaccgcggctacgatattcttgatctggcgaaacattgcgaatttgaagaagtggcgcatctgctgatccacggcaaactgccgacccgtgacgaactcgccgcttacaaaacgaaactgaaagccctgcgcggtttaccggctaacgtgcgtaccgtgctggaagccttaccggcggcgagccacccgatggatgttatgcgcaccggtgtttccgcgctcggctgcacgctgccagaaaaagaggggcataccgtctctggcgcgcgggatattgccgacaaactgctggcgagccttagcagcattctcctttattggtatcactacagccacaacggcgaacgcatccaaccggaaaccgatgacgactccatcggcggtcacttcctgcatctgctgcacggcgaaaagccaagccaaagctgggaaaaggcgatgcatatcagcctggtgctgtacgccgaacacgagtttaacgcctccacctttaccagtcgggtgattgcgggcaccggctctgatatgtattccgcgattattggcgcgattggcgcactgcgcgggccaaaacacggcggggcgaatgaagtgagcctggagatccagcaacgctacgaaacgccggacgaagccgaagcagatatccgcaagcgcgtggaaaacaaagaagtggtcattggttttggtcatccggtttacaccatcgctgacccgcgccaccaggtgattaaacgtgtggcgaagcagctcagccaggaaggcggcagcctgaagatgtacaacatcgccgatcgcctggaaacggtgatgtgggagagcaaaaagatgttccccaatctcgactggttctctgctgtttcctacaacatgatgggcgttcccaccgagatgttcacaccactgtttgttatcgcccgcgtcaccggctgggcggcgcacattatcgaacaacgtcaggacaacaaaattatccgtccttccgccaattatgttggaccggaagaccgcccgtttgtcgcgctggataagcgccagtaaacctctacgaataacaataaggaaacgtacccaatgagtgctcaaatcaacaacatccgcccggaatttgatcgtgaaatcgttgatatcgtcgattacgtcatgaactacgaaatcagctctaaagtggcctacgacaccgcacattactgcctgctcgacacgctcggctgcggtctggaagctctcgaatacccggcctgtaaaaaactgctggggccaattgttcccggcaccgtcgtacccaacggcgtgcgcgtccccggaactcagttccagctcgaccccgtccaggcggcatttaacatcggcgcgatgatccgctggctcgatttcaacgatacctggctggcggcggagtggggccatccttccgacaacctcggcggcattctggcaacggcggactggcttagccgcaacgcggtcgccagcggcaaagcgccgttgaccatgaaacaggtgctgaccgcaatgatcaaagcccatgaaattcagggctgcatcgcgctggaaaactcctttaaccgcgtcggcctcgaccacgttctgttagtgaaagtggcttccaccgccgtggtcgccgaaatgctcggcctgacccgcgaggaaattctcaacgccgttagcctggcgtgggtggacggtcagagcctgcgcacctatcgccatgcgccgaacaccggcacgcgtaaatcctgggcggcgggcgatgccacttcccgcgcggtacgtctggcactgatggcgaaaacgggcgaaatgggttacccgagtgccctgactgcgccggtgtggggcttctacgacgtctcctttaaaggtgaaagcttccgcttccagcgcccgtacggttcctacgttatggaaaatgtgctgttcaaaatctccttcccggcggagttccactcccagacggcagttgaagcagcgatgacgctctatgaacagatgcaggcagcaggcaaaacggcggcggatatcgaaaaagtgaccattcgcacccacgaagcctgtattcgcatcatcgacaaaaaagggccgctcaataacccggcagaccgcgatcactgcattcagtacatggtggcgatcccgctgctattcgggcgcttaacggcggcagattacgaggacaacgttgcgcaagataaacgcattgacgccctgcgcgagaagatcaattgctttgaagatccggcatttaccgctgactaccacgacccggaaaaacgcgccatcgccaatgccattacccttgagttcaccgacggcacacgatttgaagaagtggtggtggagtaccccattggtcatgctcgccgccgtcaggatggtattccgaaactggtcgataaattcaaaatcaatctcgcgcgccagttcccgactcgccaacagcagcgcattctggaggtttctctcgacagagctcgcctggaacagatgccggtcaatgagtatctcgacctgtacgtcatttaagtaaacggcggtaaggcgtaagttcaacaggagagcattatgtcttttagcgaattttatcagcgtagcattaacgaaccggagcagttctgggccgagcaggcccggcgtattgactggcagacgccctttacgcaaacgctcgatcacagcaatccgccgtttgcccgttggttttgtgaaggccgaaccaacttgtgccacaacgccatcgaccgctggctggagaaacagccagaggcgctggcgctgattgccgtctctagcgaaacagaagaagagcgcacctttacctttcgtcagctgcatgacgaagtgaacgcggtggccagtatgttgcgtagtttgggtgtgcagcgcggcgatcgggtgctggtgtatatgccgatgattgccgaagcgcatattactctgctggcctgcgcgcgcattggcgctattcacagcgtggtgtttggtggatttgccagccacagcgtggcggcgcgaattgatgacgctaaaccggtgctgattgtcagcgctgatgccggagcgcgcggtggcaaaatcattccctataaaaaattgctcgacgatgcgataagtcaggcgcagcaccagccacgccatgttttgctggtggatcgcgggctggcgaaaatggcgcgcgtcagcgggcgggatgtcgatttcgcgagcttgcgccatcaacacatcggcgcgcgggtaccggtggcgtggctggaatccaacgaaacctcctgcattctctacacttccggcacgaccggcaaacctaaaggcgtgcagcgtgacgtcggcggatatgcggtggcgctggcgaccagcatggacaccatttttggcggcaaagcgggcagcgtgttcttttgcgcaagcgatatcggctgggtggtggggcatagctatatcgtttacgcgccgctgctggcggggatggcgactatcgtttacgaaggattgccgacctggccggactgcggcgtgtggtggacaatcgtcgagaaatatcaggttagccggatgttcagtgcgccgaccgccattcgcgtgctgaaaaaattccctaccgctgaaattcgcaaacacgatctcagcagcctggaagtgctctatctggctggagaaccgctggacgagccgaccgccagttgggtgagcaatacgctggatgtgccggtcatcgacaactactggcagaccgaatccggctggccgattatggcgattgctcgcggtctggacgacaggccgacgcgtctgggaagccccggtgtgccgatgtatggctataacgtgcagttgcttaatgaagtcaccggcgaaccgtgtggcgtcaacgagaaagggatgctggtggtggaagggccgctgccgccggggtgtattcagaccatctggggcgacgacggccgctttgtgaagacttactggagcctgttttcccgcccggtgtacgccacctttgactggggcatccgtgacgctgacggttatcactttattctcgggcgcactgacgatgtaattaacgttgccgggcatcggctggggacgcgcgagattgaagagagtatctccagccatccgggcgttgccgaagtggcggtggttggggtgaaagatgcgctgaaagggcaggtggcggtggcgtttgtcattccgaaagagagcgacagtctggaagatcgtgatgtggcgcacagccaagagaaggcgattatggcgctggtggacagccagattggcaactttggccgcccggcgcacgtctggtttgtcagccaattgccaaaaacgcgatccggaaaaatgctgcgccgcacgatccaggcgatttgcgaaggacgcgatcctggagatctgacgaccattgatgatcctgcgagcttggatcagatccgccaggcgatggaagagtaagttattgtcggatgcgtcgcgcggtgcatccggcactgtgtgccgatgcctgatgcgacgctgacgcgttttatcatgcctacggacctgaaccgtaggtcggataaggcgctcgcgtcgcatccgacaccatgctcagatgcctgatgcgacgctgacgcgtcttatcaggcctacccactgtttttacaccgataatttttcccccacctttttgcactcattcatataaaaaatatatttccccacgaaaacgattgctttttatcttcagatgaatagaatgcggcggattttttgggtttcaaacagcaaaaagggggaatttcgtgagccaagataacaactttagccaggggccagtcccgcagagcgcgcggaaaggggtattggcattgacgttcgtcatgctgggattaaccttcttttccgccagtatgtggaccggcggcactctcggaaccggtcttagctatcatgatttcttcctcgcagttctcatcggtaatcttctcctcggtatttacactagttttctcggttacattggcgcaaaaaccggcctgaccactcatcttcttgctcgcttcagctttggtgttaaaggcagttggctgcctagtctgctactgggcggaactcaggttggctggtttggcgtcggtgtggcgatgtttgccattccggtgggtaaggcaaccgggctggatattaatttgctgattgccgtttccggtttactgatgaccgtcaccgtcttttttggcattagcgcgctgacggttcttagcgtgattgcggttccggctatcgcctgcctgggcggttattccgtgtggctggctgttaacggcatgggcggcctggacgcattaaaagcggtcgttcccgcacaaccgttagatttcaatgtcgcgctggcgctggttgtggggagttttatcagtgcgggtacgctcaccgctgactttgtccggtttggtcgcaatgccaaactggcggtgctggtggcgatggtggcctttttcctcggcaacagcttgatgtttattttcggtgcagcgggcgctgcggcactgggcatggcggatatctctgatgtgatgattgctcagggcctgctgctgcctgcgattgtggtgctggggctgaatatctggaccaccaacgataacgcactctatgcgagcggtttaggtttcgccaacattaccgggatgagcagcaaaacccttagcgtaatcaacggtattatcggtacggtctgcgcattatggctgtataacaattttgtcggctggttgaccttccttagcgcagctattcctccagtgggtggcgtgatcatcgccgactatctgatgaaccgtcgccgctatgagcactttgcgaccacgcgtatgatgagtgtcaattgggtggcgattctggcggtcgccttggggattgctgcaggccactggttaccgggaattgttccggtcaacgcggtattaggtggcgcgctgagctatctgatccttaacccgattttgaatcgtaaaacgacagcagcaatgacgcatgtggaggctaacagtgtcgaataactaagacgcatgtggaggctaacagtgagcaataacgctttacaaacaattattaacgcccggttaccaggcgaagaggggctgtggcagattcatctgcaggacggaaaaatcagcgccattgatgcgcaatccggcgtgatgcccataactgaaaacagcctggatgccgaacaaggtttagttataccgccgtttgtggagccacatattcacctggacaccacgcaaaccgccggacaaccgaactggaatcagtccggcacgctgtttgaaggcattgaacgctgggccgagcgcaaagcgttattaacccatgacgatgtgaaacaacgcgcatggcaaacgctgaaatggcagattgccaacggcattcagcatgtgcgtacccatgtcgatgttagcgatgcaacgctaactgcgctgaaagcaatgctggaagtgaagcaggaagtcgcgccgtggattgatctgcaaatcgtcgccttccctcaggaagggattttgagctatcccaacggtgaagcgttgctggaagaggcgttacgcttaggggcagatgtagtgggggcgattccgcattttgaatttacccgtgaatacggcgtggagagcctgcataaaaccttcgccctggcgcaaaaatacgaccgtctcatcgacgttcactgtgatgagatcgatgacgagcagagccgctttgtcgaaaccgttgctgccctggcgcaccatgaaggcatgggcgcgcgagtcaccgccagccacaccacggcaatgcactcctataacggggcgtataccagtcgcctgttccgcttgctgaaaatgtccggtattaactttgtcgccaacccgctggtcaatattcatctgcaaggacgtttcgatacgtatccaaaacgtcgcggcatcacgcgcgttaaagagatgctggagtccggcattaacgtctgctttggtcacgatgatgtcttcgatccgtggtatccgctgggaacggcgaatatgctgcaagtgctgcatatggggctgcatgtttgccagttgatgggctacgggcagattaacgatggcctgaatttaatcacccaccacagcgcaaggacgttgaatttgcaggattacggcattgccgccggaaacagcgccaacctgattatcctgccggctgaaaatgggtttgatgcgctgcgccgtcaggttccggtacgttatagcgtacgtggcggcaaggtgattgccagcacacaaccggcacaaaccaccgtatatctggagcagccagaagccatcgattacaaacgttgaacgactgggttacagcgagcttagtttatgccggatgcggcgtgaacgccttatccggcctacgtagagcactgaactcgtaggcctgataagcgtagcgcatcaggcaattccagccgctgatctgtgtcagcggctaccgtgattcattcccgccaacaaccgcgcattcctccaacgccatgtgcaaaaatgccttcgcagcggctgtctgccagctgtagtttatgccggatgcggcgtgaacgccttatccggcctacgtagagcactgaactcgtaggcctgataagcgtagcgcatcaggcaattccagccgcagacctgtgtcagcggttaccgactttcatttccgccaacaaccgcgcatttatccaacgccatgtgcaaaaatgccttcgcggcggctgtctgccagctatttttccgccgcaacaaaaccgccgttctctccagtagtggcggggcaagagaaatagctttaagcccgtcatgttgtgtggcaatcgctgctggtaacaatgtggaaagggaagtgcggcgaatcagctccagaaccgcgctaatactgttcgcctcaatgaccacctgtggatgtagccccgctttctcgcagtagtggtcaatttgctctctggtggcaaattccgcgctgagcaggaccagtttttcatcatgcaagcgactcaacgccacctgttcatggacggccagcggatgatgttgcgccacgactaacgctaaactttctgtcagtaaaggaattgcctccagctccgggctatgcacaggcgcgaaggcaatcccaacgtccaactcgtcgcggcaaagcatatcctcgattttctcctggctcatttcctgtagctggagcgtgatgctgggatagcgcgcatagaaatccgccattaaggggccgataaagtagctcgtaaaggtgggggtgacggcgatacgcaggcttcctcgcgtcagatcggcaacatcatgaatcgcccgtttacccgcccccagttcctgtaacgcccggctggcgtactgtcgccagacttctcctgcatcagtgagacgaatcgttcgcccgctacggtcaaacagcggcacgcctaaactctcctctaactggcgaatctgctgggaaagcgcaggttgggagacgtgcaacgcactggcggcacgggtgaagctgccatgttcagccacggcaagaaaataattgatatgtcgagagagcattcgcaacctataagtaaatccaatggaactcatcataaatgagacttttaccttatgacaatcggcgagtagtctgcctctcattccagagacagacagaggttaacggtgaaagagattattgatggattccttaaattccagcgcgaggcatttccgaagcgggaagccttgtttaaacagctggcgacacagcaaagcccgcgcacactttttatctcctgctccgacagccgtctggtccctgagctggtgacgcaacgtgagcctggcgatctgttcgttattcgcaacgcgggcaatatcgtcccttcctacgggccggaacccggtggcgtttctgctagcgtggagtatgccgtcgctgcgcttcgggtatctgacattgtgatttgtggtcattccaactgtggcgcgatgaccgccattgccagctgtcagtgcatggaccatatgcctgccgtctcccactggctgcgttatgccgatagtgcccgcgtcgttaatgaggcgcgcccgcattccgatttaccgagtaaagctgcggcgatggtacgtgaaaacgtcattgctcagttggctaatttgcaaactcatccaagcgtgcgcctggcgctcgaagaggggcggatcgccctgcacggctgggtctacgacattgaaagcggcagcatcgcagcttttgacggcgcaacccgccagtttgtgccactggccgctaatcctcgcgtttgtgccataccgctacgccaaccgaccgcagcgtaaccttatttttaaaccatcaggagttccaccatgattcagagtcaaattaaccgcaatattcgtcttgatcttgccgatgccattttgctcagcaaagctaaaaaagatctcagttttgccgagattgccgacggcaccggtctggcagaagcctttgtaaccgcggctttgctgggtcagcaggcgcttcctgccgacgccgcccgcctggtcggggcgaagctggatctcgacgaagactccattctactgttgcagatgattccactgcgtggctgcattgatgaccgtattccaactgacccaacgatgtatcgtttctatgaaatgttgcaggtgtacggtacaaccctgaaagcgttggttcatgagaaatttggcgatggcattattagcgcgattaacttcaaactcgacgttaagaaagtggcggacccggaaggtggcgaacgtgcggtcatcaccttagatggtaaacatctgccgaccaaaccgttctgacagccatgcgcaaccatcaaaagacgttcacgatgctgctggtactggtgctgattggtcttaatatgcgaccactgctcacctccgtcgggccactgctaccgcaattgcgccaggcgagcggaatgagctttagcgtggctgccctgttgaccgctctgccggtggttaccatgggcgggctggcgctggccggaagctggcttcatcagcatgtcagcgaacgtcgcagtgtcgccatcagtctgttgctgattgccgtcggtgcattgatgcgtgagctttacccgcaaagtgcgctgctgcttagcagcgcactgcttggtggggtggggatcggcatcattcaggcggtgatgcctagcgtgattaaacggcggtttcagcagcgcacgccactggtgatggggctgtggtccgcggctctgatgggcggcggtgggcttggtgccgccataacgccctggttagttcaacatagcgaaacctggtatcaaacactcgcctggtgggcgctgcctgccgttgttgcgctctttgcctggtggtggcaaagcgcccgcgaggtcgcctcttcccacaagacaacaaccactccggttcgcgtggtattcactccccgcgcgtggacgctgggtgtttacttcggtctgattaacggcggttacgccagcctgattgcctggttacccgctttctatattgagattggtgccagcgcgcagtacagcggttccttactggcattgatgacgcttgggcaagccgcaggagctttgctgatgcctgctatggctcgccatcaggatcggcgcaaactgttaatgctggcgctggtgttacaactggtggggttctgcggctttatctggctgccgatgcaattgccggtattgtgggcgatggtgtgtgggttaggtctgggcggcgcgtttccgctctgtttgctgctggcgctcgatcactctgtgcaaccggctattgctggcaagctggtggcgtttatgcagggaatcggttttatcatcgccgggcttgccccgtggttttctggcgtgctgcgtagtatcagcggcaattacctgatggactgggcatttcatgcgctgtgcgtcgttgggctgatgatcataaccctgcgttttgcaccagtacgttttccgcagctgtgggtcaaagaggcatgatgcgacgcttgttcctgcgctttgttcatgccggatgcggctaatgtagatcgctgaacttgtaggcctgataagcgcagcgtatcaggcaatttttataatttaaacactgctttcaactttataatctttgaaataatagtgcttatcccggtcgtttatttcgcgaataacccgacaaggaacgccagccgccacgacgtttggtggaatgtcttttgtgacgatactacccgcgccaataacagaattatccccgatggtgacgcctggattaataaccacatgacttccgatccagacgttattgccaatcgttatcggaaaagagtacatctcgccgttttttctcaattcatggtgtacagggtgtcccgtaacggaaagagtaacgttgggtgcaatcagtacgttatcaccgattgttaccgtgtagtcatcgacaatggttaaattgaaatttgcataaaaattgcggcctatatggatgttggaaccgtaagagaaatagacaggcggttctacccaggcgttttcccctaccgtggcaaacatttctttaatcaggctttctcttttttcaacttcacttggatggctgtgattaaactcatacattaacgttttcccacgaagtcttttttccggtaagccttcgcacatatcggtaaatagcttgcctgctcttattctttcggtcattggcatgttcaatgcgatcactccgttatgatatgttggtcggataaggcgctcgcgccgcatccgacattgattgcttaagcgacttcattcacctgacgacgcagcagggaaagcgggccggggccgctaagcgtgaacacggaaattaaggtgaagcccagcgccaccagacccagcaccagataagcgccctggaaaccgatgctttcatacatattgcccgccagtacagacataaaaatcatcgccagttgcttaaagaagcagaaacagaccagataaatcgtcgcactaaaacgcacttcaaactggctggtaatatatttaaagcagcccaccagcaggaacggtacttcaaacatatgcagcgttttcagaataaccacttccagcgcactggtggcgaagctactgccaataatacgtacagacataatagtgccagccagcagcagggcgtttttcccaccgatgcgattaatgatcagtggcgcaaagaacataatgctggcgttaagtaattcgcccattgtcgttacgtagccaaatacccgcgtaccctgttcaccggtagcaaagaagctagtaaagaaattagcaaactgttggtcaaaaacatcgtaggtgcaggaaacgccaataacatacagactcaaaaaccacagttttggctgtctgaacagttccagtgccagcttaaggctaaatgcgctatggttggcacctaccgcattggcaaccgtggcagaagagggcgcatccgttttggcgaaaaagagtaaaacggcgaggatgagtgcacagccagagcccagccagaaaacaaactgattattgatggtgaacatgatgccgacaatgctggcacacagcgcccagccaacacagccaaacatccgcgcgcgaccaaattcgaaattactgcgacggctgactttctcaataaatgcctctactgctggcgcaccggcgttaaaacaaaagcctagataaataccaccaacaatgcttcctactaaaatgttgtattgtaacagtggcccgaagataaaaataaagaacggcgcaaacatcactaacatgccggtaataatccacagcaggtatttgcgcagcccgagtttgtcagaaagcagaccaaacagcggttggaataataggctgaacagagaaatagcggcaaaaataatacccgtatcacttttgctgatatggttgatgtcatgtagccaaatcgggaaaaacgggaagtaggctcccatgataaaaaagtaaaagaaaaagaataaaccgaacatccaaaagtttgtgttttttaaatagtacataatggatttccttacgcgaaatacgggcagacatggcctgcccggttattattatttttgacaccagaccaactggtaatggtagcgaccggcgctcagctggaattccgcgcttacactcgggctccaggagtcgtcgccaccaatccccatatggaaaccgtcgatattcagccatgtgccttcttccgcgtgcagcagatggcgatggctggtttccatcagttgctgttgactgtagcggctgatgttgaactggaagtcgccgcgccactggtgtgggccataattcaattcgcgcgtcccgcagcgcagaccgttttcgctcgggaagacgtacggggtatacatgtcactcaatggcagatcccagcggtcaaaacaggcggcagtaaggcggtcgggatagttttcttgcggccctaatccgagccagtttacccgctctgctacctgcgccagctggcagttcaggccaatccgcgccggatgcggtgtatcgctcgccacttcaacatcaacggtaatcgccatttgaccactaccatcaatccggtaggttttccggctgataaataaggttttcccctgatgctgccacgcgtgagcggtcgtaatcagcaccgcatcagcaagtgtatctgccgtgcactgcaacaacgctgcttcggcctggtaatggcccgccgccttccagcgttcgacccaggcgttagggtcaatgcgggtcgcttcacttacgccaatgtcgttatccagcggtgcacgggtgaactgatcgcgcagcggcgtcagcagttgttttttatcgccaatccacatctgactaagaaagccactctggcggttaaattgccaacgcttattacccagctcgatgcaaaaatccatttcgctggtggtcagatgcgggatggcgtgggacgcggcggggagcgtcacactgaggttttccgccagacgccactgctgccaggcgctgatgtgcccggcttcactccatgcggtcgcgttcggttgcactacgcgtactgtgagccagagttgcccggcgctctccggctgcggtagttcaggcagttcaatcaactgtttaccttgtggagcgacatccagaggcacttcaccgcttgccagcggcttaccatccagcgccaccatccagtgcaggagctcgttatcgctatgacggaacaggtattcgctggtcacttcgatggtttgcccggataaacggaactggaaaaactgctgctggtgttttgcttccgtcagcgctggatgcggcgtgcggtcggcaaagaccagaccgttcatacagaactggcgatcgttcggcgtatcgccaaaatcaccgccgtaagcgctccacgggttgccgttttcatcatatttaatcaggctctgatccacccagtcccagacgaagccgccctgtaaacggggatactgacgaaacgcctgccagtatttagcgaaaccgccaagactgttacccatcgcgtgggcgtattcgcaaaggatcagcgggcgcgtctctccaggtaggctaagccattttttgatggaccatttcggcacagccgggaagggctggtcttcatccacgcgcgcgtacatcgggcaaataatatcggtggccgtggtgtcggctccgccgccttcatactgcaccgggcgggaaggatcgacagatttgatccagcgatacagcgcgtcgtgattagcgccgtggccactttcattccccaggctccagatgatcacactcgggtgattacgatcgcgctgcaccattcgcgttacgcgttcgctcatcgccggtagccagcgcggatcatcggtcagacgattcattggcaccatgccgtgggtttcaatattggcttcatccaccacatacaggccgtagcggtcgcacagcgtgtaccacagcggatggttcggataatggctacagcgcacggcgttaaagttgttctgcttcatcagcaggatatcctgcaccatcgtctgctcatccatgacctgaccatgcagaggatgatgctcgtgacggttaacgcctcgaatcagcaacggcttgccgttcagcagcagcagaccattttcaatccgcacctcgcggaaaccgacatcgcaggcttctgcttcaatcagcgtgccgtcggcggtgtgcagttcaaccaccgcacgatagagattcgggatttcggcgctccacagtttcgggttttcgacgttcagacgtagtgtgacgcgatcggcataaccaccacgctcatcgataatttcaccgccgaaaggcgcggtgccgctggcgacctgcgtttcaccctgccataaagaaactgttacccgtaggtagtcacgcaactcgccgcacatctgaacttcagcctccagtacagcgcggctgaaatcatcattaaagcgagtggcaacatggaaatcgctgatttgtgtagtcggtttatgcagcaagctgacgtcacggaaaatgccgctcatccgccacatatcctgatcttccagataactgccgtcactccagcgcagcaccatcaccgcgaggcggttttctccggcgcgtaaaaatgcgctcaggtcaaattcagacggcaaacgactgtcctggccgtaaccgacccagcgcccgttgcaccacagatgaaacgcgctgttaacgccatcaaaaataattcgcgtctggccttcctgtagccagctttcatcaacattaaatgtgaggctgtaacaacccgtcggattctccgtgggaacaaacggcggattgaccgtaatgggataggtcacgttggtgtagatgggcgcatcgtaaccgtgcatctgccagttactggggacgacgacagtatcggcctcaggaagatcgcactccagccagctttccggcaccgcttctggtgccggaaaccaggcaaagcgccattcgccattcaggctgcgcaactgttgggaagggcgatcggtgcgggcctcttcgctattacgccagctggcgaaagggggatgtgctgcaaggcgattaagttgggtaacgccagggttttcccagtcacgacgttgtaaaacgacggccagactatccgtaatcatggtcatagctgtttcctgtgtgaaattgttatccgctcacaattccacacaacatacgagccggaagcataaagtgtaaagcctggggtgcctaatgagtgagctaactcacattaattgcgttgcgctcactgcccgctttccagtcgggaaacctgtcgtgccagctgcattaaactatcggccaacgcgcggggagaggcggtttgcgtattgggcgccagggtggtttttcttttcaccagactgacgggcaacagctgattgcccttcaccgcctggccctgagagagttgcagcaagcggtccacgctggtttgccccagcaggcgaaaatcctgtttgatggtggttaacggcgggatataacaactgctgtcttcggtatcgtcgtatcccactacgctgatatccgcaccaacgcgcagcccggactcggtaatggcgcgcattgcgcccagcgccatctgatcgttggcaaccagcatcgcagtgggaacgatgccctcattcagcatttgcatggtttgttgaaaaccggacatggcactccagtcgccttcccgttccgctatcggctgaatttgattgcgagtgagatatttatgccagccagccagacgcagacgcgcgctgacagaacttaatgggcccgctaacagcgcgatttgctggtgacccaatgcgaccagatgctccacgcccagtcgcgtaccgtcttcatgggagaaaataatactgttgatgggtgtctggtcagagacatcaagaaataacgccggaacattagtgcaggcagcttccacagcaatggcatcctggtcatccagcggatagttaatgatcagcccactgacgcgttgcgcgagaagattgtgcaccgccgctttacaggcttcgacgccgcttcgttctaccatgctcaccaccacgctggcacccagttgatcggcgcgagatttaatcgccgcgacaatttggctcggcgcgtgcagggccagactggaggtggcaacgccaatcagcaagctctgtttgcccgccagttgttgtgccacgcggttgggaatgtaattcagctccgccatcgccgcttccactttttcccgcgttttcgcagaaacgtggctggcctggttcaccacgcgggaaacggtctgataagagacaccggcatactctgcgacatcgtataacgttactggtttcacattcaccaccctgaattgactctcttccgggcgctatcatgccataccgcgaaaggttttgcgccattcgatggtgtcaacgtaaatgcatgccgcttcgccttccggccaccagaatagcctggctttcaaccccttcttcgatctgttttgctacccgttgtagcgccggaagatgcttttccgctgcctgttcaatggtcattgcgctcgccatatacaccagattcagacagccaatcacccgttgttcactgcgcagcggtacggcgatagaggcgatcttctcctcctgatcccagccgcggtagttctgtccgtaaccctctttgcgcgcgcgcgccagaatggcttccagctttaacggttcccgtgccagttgatagtcatcaccggggcgggaggctaacatttcgattaattccttgcggtcttgttccgggcaaaaggccagccaggtcaggccgctggcggttttcagaagcggcaaacgtcgcccgaccattgcccggtgaaaggataagcggctgaaacggtgagtggtttcgcgtaccaccattgcatcaacatccagcgtggacacatctgtcggccataccacttcgcgcaacagatcgcccagcagtggggccgccagtgcagaaatccactgttcgtcacgaaatccttcgcttaattgccgcactttgatggtcagtcgaaaactatcatcggaggggctacggcggacatatccctcttcctgcagcgtctccagcagtcgccgcacagtggtgcgatgcaggccgctgagttccgccagcagcccgacgctggcaccgccatcaagtttatttaacatatttaataacattagaccgcgggttaagccgcgcacggttttgtattccgtctgctcattgttctgcatattaatactcatttctatagttaaaacaacgtggtgcacctggtgcacattcgggcatgttttgattgtagcgctaaacacccttcctatactgagcgcacaataaaaaatcatttacatgtttttaacaaaataagttgcgctgtactgtgcgcgcaacgacattttgtccgagtcgtgaggtactgaaatggcaatacaacaccctgacatccagcctgctgttaaccatagcgttcaggtggcgatcgctggtgccggcccggttgggctgatgatggcgaactatctcggccagatgggcattgacgtgctggtggtggagaaactcgataagttgatcgactacccgcgtgcgattggtattgatgacgaggcgctgcgcaccatgcagagcgtcggcctggtcgatgatgttctgccgcacactacgccgtggcacgcgatgcgttttctcaccccgaaaggccgctgttttgctgatattcagccaatgaccgatgaatttggctggccgcgccgtaacgcctttattcagccgcaggtcgatgcggtgatgctggaaggggtgagccgttttccgaatgtgcgctgcttgttttcccgcgagctggaggccttcagtcagcaagatgacgaagtgaccttgcacctgaaaacggcagaagggcagcgggaaatagtcaaagcccagtggctggtagcctgtgacggtggagcaagttttgtccgtcgcactctgaatgtgccgtttgaaggtaaaactgcgccaaatcagtggattgtggtagatatcgccaacgatccgttaagtacgccgcatatctatttgtgttgcgatccggtgcgcccgtatgtttctgccgcgctgcctcatgcggtacgtcgctttgaatttatggtgatgccgggagaaaccgaagagcagctgcgtgagccgcaaaatatgcgcaagctgttaagcaaagtgctgcctaatccggacaatgttgaattgattcgccagcgtgtctacacccacaacgcgcgactggcgcaacgtttccgtattgatcgcgtactgctggcgggcgatgccgcgcacatcatgccggtatggcaggggcagggctataacagtggtatgcgcgacgcctttaacctcgcatggaaactggcgttggttatccaggggaaagcccgcgatgcgctgctcgatacctatcaacaagaacgtcgcgatcacgccaaagcgatgattgacctgtccgtgacggcgggcaacgtgctggctccgccgaaacgctggcagggtacgttacgtgacggcgtttcctggctgttgaattatctgccgccagtaaaacgctacttcctcgaaatgcgcttcaagccgatgccgcaatattacggcggtgcgctgatgcgtgagggcgaagcgaagcactctccggtcggcaagatgtttattcagccgaaagtcacgctggaaaacggcgacgtgacgctgctcgataacgcgatcggcgcgaacttcgcggtaattggctggggatgcaatccactgtgggggatgagcgacgagcaaatccagcagtggcgcgcgttgggcacacgcttcattcaggtggtgccggaagtgcaaattcataccgcacaggataaccacgacggcgtactacgcgtgggcgatacgcaaggtcgcctgcgtagctggttcgcgcaacacaatgctagcctggtggtgatgcgcccggatcgctttgttgccgccaccgccattccgcaaaccctgggcaagaccctgaataaactggcgagcgtgatgacgctgacccgccctgatgccgacgtttctgtcgaaaaggtagcctgatatgcacgcttatcttcactgtctttcccacagcccgctggtggggtatgtcgacccggcgcaagaggtgctcgatgaggtcaatggcgtgattgccagcgcccgcgagcgtattgcggcattctcccctgaactggtggtgctgtttgcgccagatcactacaacggctttttctatgacgtgatgccaccgttctgtttaggcgttggagcgacggcaattggtgatttcggcagtgcggcaggagagctgcccgtgcctgtggagctggcggaggcctgtgcgcatgccgtcatgaagagcgggatcgatcttgccgtttcttactgtatgcaggtggaccacgggttcgcccagccgctggagttcctgctcggtgggctggataaggtgccagttctgcctgtgttcatcaacggtgtcgccacgccgctgcccggtttccagcgtacccgcatgttgggtgaagccattggacgtttcaccagcactctcaataaacgcgtgctgttcctgggttccggtgggctttcccatcagccgccggtgcccgaactggcgaaagccgatgcccatatgcgcgaccgtctgttggggagcgggaaagatttacccgccagtgagcgcgaattgcgtcagcaacgggtgattagcgccgctgagaagtttgttgaggatcagagaacgctgcatccgctcaacccgatttgggataaccagttcatgactttgctggagcagggacgcatacaggaactggatgccgtcagtaacgaagagctttccgccattgccggaaagagcacacatgaaatcaaaacctgggtcgccgcttttgccgctatttctgcgtttggcaactggcgtagcgaagggcgttattaccgcccaatcccggagtggattgccggatttggcagcttaagcgccagaacagagaactgaatatgcaggagaagatgatgagttatcagccacaaaccgaagccgccaccagccgttttctgaatgtagaagaagcgggtaaaacgctgcgcatccattttaatgactgcggacaaggcgacgaaaccgttgtcctgctgcatggttccggcccgggtgctactggctgggcgaacttcagccgcaatatcgatccgctggtagaggcgggctatcgggtgatcctgctggattgtccgggttggggcaagagcgatagcgtcgttaatagtggtagccgaagcgatcttaatgcacgaatcctgaaaagcgtggtggatcaactggatatcgccaaaatccacctgctgggcaacagcatggggggccatagttctgtggcgttcacccttaaatggccggagcgcgtcggcaaactggtgctgatgggcggcggtacgggcggcatgagtttgtttacgccgatgccaaccgaaggtattaagcgactgaatcagctttatcgtcagccgactatcgaaaacctgaagctgatgatggatatcttcgtttttgataccagcgatttgaccgacgccctgtttgaagcgcgcctgaataatatgctgagccgccgcgatcacctggaaaacttcgttaagagcctggaagctaatccgaaacagttcccggattttggcccacgtctggcggaaatcaaagcgcaaaccctgattgtctgggggcgcaacgaccgctttgtgccgatggatgcgggtctgcgtctgctgtccggcattgccggttctgaactgcatatcttccgcgactgtggtcactgggcgcagtgggaacatgccgacgctttcaatcaactggtgctgaatttcctcgcacgcccttaaggaatggtcatgacgaagcatactcttgagcaactggcggcggatttacgccgcgccgcagagcagggcgaagcgattgcaccgctgcgcgatctgattggtatcgataacgctgaagcggcttacgccattcagcacataaatgtgcaacatgacgttgcgcaggggcgtcgcgtggtagggcgtaaagtgggcctgacacatccgaaagtgcaacaacaactgggcgttgatcaaccggattttgggacgttatttgccgacatgtgttatggcgataacgaaatcattcctttttcccgtgttctgcaaccccgcattgaagcggagatcgcactggtgttgaaccgcgatttgcccgcaaccgatatcaccttcgacgaattgtataacgccattgaatgggtacttccggcgctggaagtggtggggagccgcattcgcgactggagcattcagtttgtcgataccgtggcagataacgcctcctgtggggtgtatgtcatcggcggtccggcgcaacgtccggcggggttagacctgaaaaactgcgccatgaagatgacgcgtaataacgaagaggtttctagcgggcgcggcagcgaatgcctgggacatccgcttaatgcggccgtctggctggcacgcaaaatggccagtctgggtgaaccgctgcgcaccggagatatcattcttaccggggcattaggtccgatggtggcggtgaatgcgggcgatcgttttgaagcccatattgaaggcataggtagtgttgctgcgacatttagtagcgcagccccaaaaggaagtctgagttgagctaagccccaaaaggaagtctgtcatgagtaagcgtaaagtcgccattatcggttctggcaacattggtaccgatctgatgattaaaattttgcgtcacggtcagcatctggagatggcggtgatggttggcattgatcctcagtccgacggtctggcgcgcgccagacgtatgggcgtcgccaccacccatgaaggggtgatcggactgatgaacatgcctgaatttgctgatatcgacattgtatttgatgcgaccagcgccggtgctcatgtgaaaaacgatgccgctttacgcgaagcgaaaccggatattcgcttaattgacctgacgcctgctgccatcggcccttactgcgtgccggtggttaacctcgaggcgaacgtcgatcaactgaacgtcaacatggtcacctgcggcggccaggccaccattccaatggtggcggcagttagtcgcgtggcgcgtgttcattacgccgaaattatcgcttctatcgccagtaaatctgccggacctggcacgcgtgccaatatcgatgaatttacggaaaccacttcccgagccattgaagtggtgggcggcgcggcaaaagggaaggcgattattgtgcttaacccagcagagccaccgttgatgatgcgtgacacggtgtatgtattgagcgacgaagctagtcaagatgatatcgaagccagtatcaatgaaatggctgaggcggtgcaggcttacgtaccgggttatcgcctgaaacagcgcgtgcagtttgaagttatcccgcaggataaaccggtcaatttaccgggcgtggggcaattctccggactgaaaacagcggtctggctggaagtcgaaggcgcagcgcattatctgcctgcctatgcgggcaacctcgacattatgacttccagtgcgctggcgacagcggaaaaaatggcccagagtctggcgcgcaaggcaggagaagcggcatgaacggtaaaaaactttatatcagcgacgtcacattgcgtgacggtatgcacgccattcgtcatcagtatagcctggaaaacgttcgccagattgccaaagcactggacgatgcccgcgtggatagcattgaagtggcccacggcgacggtttgcaaggttccagctttaactatggtttcggcgcacatagcgaccttgaatggattgaagcggcggcggatgtggtgaagcacgccaaaatcgcgacgttgttgctgccaggaatcggcactattcacgatctgaaaaatgcctggcaggctggcgcgcgggtggttcgtgtggcaacgcactgtaccgaagctgatgtttccgcccagcatattcagtatgcccgcgagctcggaatggacaccgttggttttctgatgatgagccatatgaccacgccggagaatctcgccaagcaggcaaagctgatggaaggctacggtgcgacctgtatttatgtggtggattctggcggtgcgatgaacatgagcgatatccgtgaccgtttccgcgccctgaaagcagagctgaaaccagaaacgcaaactggcatgcacgctcaccataacctgagtcttggcgtggcgaactctatcgcggcggtggaagagggctgcgaccgaatcgacgccagcctcgcgggaatgggcgcgggcgcaggtaacgcaccgctggaagtgtttattgccgccgcggataaactgggctggcagcatgggaccgatctctatgcgttaatggatgccgccgacgacctggtgcgtccgttgcaggatcgaccggtacgagtcgatcgcgaaacgctggcgctgggatacgctggtgtttacagcagcttcctgcgtcactgtgaaacggcggcggcgcgttatggcttaagtgcggtggatattctcgttgagctgggcaaacgccggatggttggcggccaggaggatatgatcgttgacgtggcgctggatctgcgcaacaacaaataatgatgactgccgagaacgtgcattttgtatgcccatcccagcacgactgccggatgcggcgtgaacgccttatccggcctacggatggcgtgagaatttgtaggtctgataagacgcgttagcgtcgcatcaggcatctgcgcacgactgccggatgcggcgtgaacgccttatccggcctacggatggcgcgggaatttgtaggcctgataagacgcgttagcgtcgcatcaggcatctgcgcacgactgccggatgcggcgtgaacgccttatccggcctacgggtggcgcgagaatttgtaggcctgataagacgcgttagcgtcgcatcaggcatctgcgcacgactgccggatgcggcgtaaacgccttatccggcctacggatggcgcgggaatttgtaggcctgataagacgcgttagcgtcgcatcaggcatctgcacacgactgccggatgcgataaacgtcttgtccggcctacatttcgcccgtaggcagtcattaaatagttctgattacgcggctggcaatgtatcagtcgcgattcacctgcactcgcaacgaggttcatcttatgagcactcgtacccctagtagttctagttcccgcctgatgctgaccatcgggctttgttttttggtcgctctgatggaagggctggatcttcaggcggctggcattgcggcgggtggcatcgcccaggctttcgcactcgataaaatgcaaatgggctggatatttagcgccggaatactcggtttgctacccggcgcgttggttggcggaatgctggcggaccgttatggtcgcaagcgcattttgattggcagtgttgcgctgtttggtttgttcagtctggcaacggcgattgcctgggatttccccagtctggtctttgcgcggctgatgaccggtgtcgggctgggggcggcgttgccgaatcttatcgccctgacgtctgaagccgcgggtccacgttttcgtgggacggcagtgagcctgatgtattgcggtgttcccattggcgcggcgctggcggcgacactgggtttcgcgggggcaaacttagcatggcaaacggtgttttgggtaggtggtgtggtgccgttgattctggtgccgctattaatgcgctggctgccggagagcgcggttttcgctggcgaaaaacagtctgcgccaccactgcgtgccttatttgcgccagaaacggcaaccgcgacgctgctgctgtggttgtgttatttcttcactctgctggtggtctacatgttgatcaactggctaccgctacttttggtggagcaaggattccagccaagccaggcggcaggggtgatgtttgccctgcaaatgggggcggcaagcgggacgttaatgttgggcgcattgatggataagctgcgtccagtaaccatgagcctactgatttatagcggcatgttagctagcctgctggcgcttggaacggtgagcagttttaacggtatgttgctggcgggatttgtcgcggggttgtttgcgacaggtgggcaaagcgttttgtatgccctggcaccgttgttttacagtagccagatccgcgcaacaggtgtgggaacagccgtggcggtagggcgtctgggggctatgagcggtccgttactggccgggaaaatgctggcattaggcactggcacggtcggcgtaatggccgcttctgcaccgggtattcttgttgctgggttggcggtgtttattttgatgagccggagaagtcgaatacagccgtgcgccgatgcctgacgtgccttattaggcaggggcgaaagggacttcaccccaatacacctacggcgtttacaggtatactcgctaaaaattattcagcgggtttggaaacaaagatggcaaaacttaccttacaagagcagttgctcaaagcaggattagtcaccagcaaaaaagcggcgaaggtggagagaacggcgaaaaaaagccgcgttcaggcgcgtgaagctcgggcggcggtagaagaaaataaaaaggcacagcttgagcgtgataaacagcttagcgaacagcaaaaacaagcggcgttggcgaaagaatataaagctcaggtgaagcagcttattgaaatgaaccgaatcaccattgccaatggcgatattggttttaacttcactgacggcaatctgattaagaagatttttgtcgataagctcacacaggcgcagttgattaatggtcgtctggcgattgcccgcttgttggtcgataacaatagcgaaggtgaatacgccattattcccgccagcgttgccgataaaattgctcagcgcgatgccagcagtatagtgttgcacagcgcgctcagcgccgaagagcaggatgaagacgacccgtatgccgacttcaaagtgcctgatgatttgatgtggtaaacatagataagtcgtgcgcagatgcctgatgcgacgctatgcgcgtcttatcaggcctacggtttatgggcgaagtgtagaccggataaggcgttcacgccgcatccggcagtcgtgcgccatgcctgatgcgacgctttgcgcgtcttatcaggcctacggcttacgggcgaagtgtaggccggataaggcgttcacgccgcatccggcagtcgtgctattatcaacgcatattcagtttattggcgtggtaggcaatatgctcgccaataaaactggagacaaaataatagctgtgatcataaccctcgtgataacggattaacgtcttgatattcatctcctggcagatcttttcaagatttggagtccgcagctgttctgcgtaaaaatcatcactcaacccctgatcaaccatgatttccgcaacgcgttgaccttgactaataagactcaccgggtcgtaatccaaccaggcatctttattttcagcaagatatgcagcaaaggcttgctgtccccacggcacttggcttggggagacaatggggctaaacgcgctgacgctgacatattcatctgggttacgtaacgccagcaccagcgcgcccagcccgcccatagaatgaccagagatagactttttggccgttgccggaaaatgatgcatcactaaatccggcagctcgttgcggatatagtcatacattttgtaatgttcattccacggcgcttgcgtcgcgttcaggtaaaacccggcaccttgcccgagatcgtaacggtcagcatctgcgacatgactgcctcgcggactggtgtccggcgcaacaacaataatgttgtgctcagccgcgtaacgctgcatcccgcttttagtaatgaaattctgctcgttgcaggtcaggccactaagccagtacagcaccggcaatttttcattcgcggcttttggtgggagatagacgccgacattcatttcacatttcagactttgggaataatgccgatacatattttgccagccgccaaagctgacatgtttttcaatgagttccatcagtcattatctcagggttaatcccccggacggctgcccggggagagtattaagaacccccgcctgaagtggacggggtaaacctgcgggaaatcagtaacgaattacggttcgaatggatttgccttcatgcatcaggtcgaaggcgtcattaatttcatccaggctcatggtatgcgtgacaaacggttccagatcgatatcacctttcatcgcatcttcaaccatgcccggtaactgggaacgacctttcacgccgccaaacgcggaacctttccatacgcgaccagtgaccaactggaatggacgggtggagatttcctgaccggcaaccgcgaccccgatgatcacgctctgaccccagccgcggtgcgcactttccagcgccgcacgcatcacgttgacgttaccgatgcattcaaaggtatggtcgataccccatttgttgatatccaacaggacatcttttatcggtttgtcgtagtcattcgggttaatgcagtcggtagcaccgaagcgacgcgccagatcgaatttcttcgggttggtatcgatagcgataatccgacccgctttcgcctgacgcgcgccctgaaccactgccagaccaatcgcgccaagaccaaacacggcaacagaatcacctggctggactttagctgtgttgtgtaccgcgccaataccggtggtcacgccacagcccagcaggcagacgtgttcatggtttgcttctggattaatttttgccagagacacttccgcgactacggtgtattcactgaatgtagagcaccccatgtagtgataaagcggctgcccgttgtaagaaaaacgggtggtgccgtctggcatcaggcctttaccctgggtttcgcgaaccgcaacacagaggttagttttgccagaacgacagaactcacactcgccgcactccgcggtgtaaagcgggatcacatggtcgccaggtttgacgctggttacgccttcaccgacttcaaccacaacgccggccccttcgtgaccgagaaccaccgggaatacaccttccgggtcatcgccggagagggtaaatgcgtcggtatggcaaacgccggtatgggtgactttaattagcacttcaccttttttcggtggtgcaacgtcaatttcaacgatttccagcggtttaccgggagcaaatgcaacggcagcacgacttttcatctctcgctcttcctcaatatggtaatagattcagttatttaagataggcacgaaccagttcaatagtgtcgtcaacggattggctgacttcgcggctgtagcagtcatttcggtcaaacgtttcccggatatggctttcaagcacttctgccatcagcccattagccgcgccccgaacggcagcgatctgttggagtatggcacggcattcggcatcaccctccaggctccgttccagagcatcaatctgcccccgaatacgacgaactcgagtaaggacctttttcttctcttccggagtactgggcatttcgcacctcatcatctgcatgcaatatactataggggggtattctatatgtcaatgcatacccccctatagtatataacactggagaataaaatttatccggtgaatgtggtcggaaaacaaagaggaaaggggggggggctaatcggcagggaaggccgccccggatagcgggcggcagaaggaatcagaatttccaggtcagacgggctgcaagttgcagaccgttacgagatggacggtcccctcgcccccttggggagagggttagggtgagggggcgttcaccgtactttcaacaggttaactccccctttctgagaggaaacaaaattaacgcagaatcttcttctcagccaaatccagcgcaaagtagctgaaaatcagatccgcacccgcacgcttaatgctacctaagctttcgagcacgactttctcttcatctatagcacccgccagcgcggcgaacttaatcatcgcatactcaccgctcacctgatacgcgccaatcggcaattcagtacgttcacgcagctcacgcacgatgtcgaggtacgctccagcaggtttaaccatcaggcagtctgcgccctgggcttcatccagcagactttcacgaatcgcctcacgacggttcattgggttcatctgatagcttttgcggtcgccttttaatgcgcttccggcagcttcacggaacgggccataaaaggaggaggcgaacttggtgctatagctcataatcgccgtatctttaaatcccgcagcgtccagcgcctgacgaatcgcctgtacctggccgtccatcgcggcggaaggggcgatgaagtctgcacctgcagcagctgcaaccacggcttgcttgcctaaattttccagagtcgcgtcgttgtcgacgccatgctcgcacagcacaccgcagtgaccgtgagaagtgtattcacagaagcaggtgtcactcataacgatcatttctggcacggtctgcttgcagatgcggctcatacgcgccaccagtccatcttcccgccaggcatcgctgccggtttcatcggtatggtgagagatgccaaaagtcatcacggaacgaataccggcgttggcgatgcgttcaatttcgcgtgccagatgtttctctggaatgcgcatcacgcctggcatggcttcaacggctttgtagtcgtcaatttcttcttcaacaaagatcggcaacaccaggtcgttaaggctaagtgttgtctcttcaaacatagcgcgcagcgcaggagatttgcgcaggcgacgagggcgttggattaagtctgtcatggtctgcctgatgtttgtggaatcgaggggcatagtatacctgaagcagggtagggatgttttacgaaagttgtcgcgatgttgacaagaagagaatggaagagaggccaggacatctttttaatagaaacagcaataattttatattcactgaaaatatttttaatcttgaatattatcgggcgttaaaatattacattgtggttttcaatgcgttatccgcagcgtgacgctccagcgccagttcaatcaaacgtgtgatcagatcggtgtaacccagaccgctggcttgccacagcttcggatacatactgatattagtgaagccaggcagggtgttgatctcgttgatcaccacttcgttctctggggttaaaaacacgtctacacgcgccatgcctgcgcatcccaacgtttgataagcctgaacggcaatcgcccggatcttatcgttgatttctggcgcaatggctgccggaactaccactttcgcgccatcttcgtcaatgtacttggtgtcgtaggcatagaaatcgctggtgagtacgatctctccacaggtgctggcttgcggattgtcgttgcccagaactgcgcattcgatctcacgacctttgatcccttgctcaacgatcactttatgatcgaactcgaacgccagatcgacggcaattgcgtactgttcttcactggttactttgctgacaccaacagaagagccctgattagccggttttacaaacagtggtaaccccagtttagactccacttcggcaaaactaatgttgtgacgattggcgcgcgtcagggtaataaatggcgcaatgttcagcccggcatcgcgtagcagacgtttggtgacatctttgtccatacaggctgcactagccagaacatcagaacctacaaacggtaaattggcgacccgcagcattccctgcaaggaaccatcttcgcccagcgtaccgtggacaatcgggaaaatgacatccaccgtcggcaacggctgaccgttttgcgcgtcgataagctgatgctcatgtttacctggcacctgcgcaaggctggtcgcgctagggcgcaacgcaatatgggcaggatcgtctgcatttagcagataattgctggcatcgctgacgtgccattgcccttgtttatcaatgcccagcagcacaacgtcgaagcgacttttatcaatggcatcgacaatgttttttgcgctttgcagagacacttcatgttccgcacttttaccaccaaaaacgattcctacccgcagtttttccatcttaaaaacctatcccgtctaacacaaagtgcatacattaccacgacaaaacgggggattcgcggccttctgaaagattgttgcaatcttctgctgacaaagcgtgcaacgtactggtgaagaaagtgcgttatctcaaagatgtgcgcaagatcacaaaaatgatgaacgggaagctaatttattcctggcttaaatggccatgcggtgagtttttttctcttaattataagttaacgaagagaatatatttcataacttttatttataataaaggttgataattaaaagcctatattttgtgtgggtaattatttaaataagagaaacgtttcgctggtaatcaaacaaaaaatatttgcgcaaagtatttcctttgtcataaaaataatacttccagacactatgaagttgtgaaacataatgttaacttctccatactttggataaggaaatacagacatgaaaaatctcattgctgagttgttatttaagcttgcccaaaaagaagaagagagcaaagaactgtgtgcgcaggtagaagctttggagattatcgtcactgcaatgcttcgcaatatggcgcaaaatgaccaacagcggttgattgatcaggtagagggggcgctgtacgaggtaaagcccgatgccagcattcctgacgacgatacggagctgctgcgcgattacgtaaagaagttattgaagcatcctcgtcagtaaaaagttaatcttttcaacagctgtcataaagttgtcacggccgagacttatagtcgctttgtttttattttttaatgtatttgtacatggagaaaataaagtgaaacaaagcactattgcactggcactcttaccgttactgtttacccctgtgacaaaagcccggacaccagaaatgcctgttctggaaaaccgggctgctcagggcgatattactgcacccggcggtgctcgccgtttaacgggtgatcagactgccgctctgcgtgattctcttagcgataaacctgcaaaaaatattattttgctgattggcgatgggatgggggacagcgaaattactgccgcacgtaattatgccgaaggtgcgggcggcttttttaaaggtatagatgccttaccgcttaccgggcaatacactcactatgcgctgaataaaaaaaccggcaaaccggactacgtcaccgacagcgctgcaagtgcaaccgcctggagtaccggtgtcaaaacctataacggcgcgctgggcgtcgatattcacgaaaaagatcacccaacgattctggaaatggcaaaagccgcaggtctggcgaccggtaacgtttctaccgcagagttgcaggatgccacgcccgctgcgctggtggcacatgtgaccagccgcaaatgctacggtccgagcgcgaccagtgaaaaatgtccgggtaacgctctggaaaaaggcggaaaaggaagcattaccgaacagctgcttaacgctcgtgccgacgttacgcttggcggcggcgcaaaaacctttgctgaaacggcaaccgctggtgaatggcagggaaaaacgctgcgtgaacaggcacaggcgcgtggttatcagttggtgagcgatgctgccagtctgaatagcgtgacggaagcgaatcagcaaaaacccctgcttggcctgtttgctgacggcaatatgccagtgcgctggctaggaccgaaagcaacgtaccatggcaatatcgataagcccgcagtcacctgtacgccaaatccgcaacgtaatgacagtgtaccaaccctggcgcagatgaccgacaaagccattgaattgttgagtaaaaatgagaaaggctttttcctgcaagttgaaggtgcgagtatcgataaacaggatcatgctgcgaatccttgtgggcaaattggcgagacggtcgatctcgatgaagccgtacaacgggcgctggaattcgctaaaaaggagggtaacacgctggtcatagtcaccgctgatcacgcccacgccagccagattgttgcgccggataccaaagctccgggcctcacccaggcgctaaataccaaagatggcgcagtgatggtgatgagttacgggaactccgaagaggatagtcaagaacataccggcagtcagttgcgtattgcggcgtatggcccgcatgccgccaatgttgttggactgaccgaccagaccgatctcttctacaccatgaaagccgctctggggctgaaataaaaccgcgcccggcagtgaattttcgctgccgggtggtttttttgctgttagcaaccagacttaatggcagatcacgggcgcatacgctcatggttaaaacatgaagagggatggtgctatgaaaataacattactggttaccttgcttttcggtctggtttttttaaccaccgtcggcgctgccgagagaactttaaccccacaacaacagcgtatgacctcctgtaatcagcaggcgacggcgcaggcgttgaaaggggatgctcgtaagacctacatgagtgattgcctgaagaacagcaagtctgcgcctggcgaaaaaagtttgacgccacagcagcaaaagatgcgcgaatgcaataatcaagcaacacaacaatctctgaaaggtgatgatcgtaataagtttatgagtgcctgcctcaagaaagccgcctgatacctgatagtgctaacgggtgagctacgaaaatggctcacccgaaatatcatacttctgcctttagctccgtctctataatttgggaaaattgtttctgaatgttcccaaaaataatgaatgatgaaaactttttcaaaaaagcggcggcgcacggggaggaacctcctttaactcctcaaaacgaacatcagcggtccgggctgcgcttcgcccgtcgcgtcagactaccccgtgcggttggcctggctggcatgttcttaccgattgctagtacgctggttagtcacccgccgccgggctggtggtggctggtgttggtcggctgggcgttcgtctggccgcatttagcctggcagatagcgagcagggccgtcgatccgcttagccgggaaatttacaacttaaaaaccgatgcagtattagcgggaatgtgggtaggcgtaatgggcgtaaacgtgctgccttccaccgcgatgttgatgattatgtgtctgaatttgatgggggcaggcggcccccgtctgtttgtcgcgggtctggtgttgatggtggtttcctgccttgtcaccctcgagctgacgggcattaccgtgagcttcaatagtgcgccgctggaatggtggctctcccttcccattattgtcatttatcctctgctgtttggctgggtcagctaccagacggcaaccaaactggcggaacataaacgcaggttgcaggtcatgagtacccgcgacggcatgacgggcgtgtataaccgacgtcattgggaaactatgttacgcaatgaatttgataactgtcggcggcataatcgcgatgcaacgttactgattatcgatatcgaccatttcaagagcatcaacgatacctggggccatgatgtgggcgatgaagcgattgtggcgcttacccgacagttacaaattaccctgcgcggtagcgatgtgattggtcggtttggcggcgatgagtttgcagtaatcatgtccggtacgccagctgagagcgccattaccgccatgttacgggtgcatgaagggctaaatacattacgtttgccgaatacgccacaggtaactttacggattagtgtgggggttgcgccgctgaacccacaaatgagtcactatcgtgagtggttgaaaagcgcagatttggcgctttacaaagcaaagaaagccggacgtaaccgcaccgaagtggcggcctgacgtccggcgaaagtcatcaggatttgctgagtttttcacttttttccatacacttcgtcatcgcttcgatcactgcagcacggaagcctttctcttccagtacgcgtaccgcttcaatggtggtgcctcccggactgcagaccatatctttcagtgcccccggatgttctcccgtttccagcaccatttttgcggaacccattaccgcctgagcggcaaatttatacgcctgggcgcgtggcatcccgcccagcacggcggcgtcggccatcgcttcgataaacataaatacgtaggctgggctagaaccgctcacaccgaccaccgggtggatcatcggctcagcaattacttccgcttcgccaaagcagcggaaaatattcagcacatcagcggtatcttctggggttaccagcgcgtttggcgttacggaggtcatcccggcattaaccagtgcgggagtgttcggcatggcgcggataattttccggtcatggcccagcgcgcgggcaagctggtcgagcgtgacacctgcagcaatagaaacgaccagagagtctttattcaggctggaggtgatttcgctaagcactttaatcatgatgccaggtttaacggcagcaaaaatgatgtcggcgatttgcgccacttcttgcgcgctttctgcggcgttgatgccgaactggtcatgcagggcggcgactttatccggggagggggtgtatacccagatttgccctggaagcacctgaccgctggcaatcagaccgccgagaatggcttttcccatattgccgcagccaataaaaccgattttcttttccattgcctcactcctgccgtgaaattcattgttttgataatcgctggcagaagcataaacagaactatgccggaaggcaaaagcgcgacacaatagaggattacccaacaaaggatgactttatgacaatttgggtggatgccgacgcgtgtcccaatgtaattaaagagattttgtatcgcgcggcggaacgtatgcagatgccgctggtactggtagcaaaccagagtttacgcgtgccgccaagccgatttattcgtacgctgcgcgtcgcggcaggtttcgacgttgccgataacgaaattgtccggcagtgtgaagcgggcgatttggtgatcaccgcagatatacctttggctgctgaagccatcgagaaaggcgctgcggcgcttaatccgcgcggcgaacgttacacgccagcgaccattcgtgagcgcctgacgatgcgcgattttatggataccttacgtgccagtgggatccagaccggcggaccagatagccttagtcaacgtgaccgccaggcctttgccgcggagctggagaagtggtggctggaagtgcaacgtagtcgtggctaaatgtaatttattatttacacttcattcttgaatatttattggtatagtaaggggtgtattgagattttcactttaagtggaattttttctttacaatcgaaattgtactagtttgatggtatgatcgctattctcatgacaccggctttcgccgcattgcgacctattggggaaaacccacgatgacacaacctctttttctgatcgggcctcggggctgtggtaaaacaacggtcggaatggcccttgccgatagccttaaccgtcggtttgtcgataccgatcagtggttgcaaagtcagctcaatatgacggtcgcggagatcgtcgaaagggaagagtgggcgggatttcgcgccagagaaacggcggcgctggaagcggtaactgcgccatccaccgttatcgctacaggcggcggcattattctgacggaatttaatcgtcacttcatgcaaaataacgggatcgtggtttatttgtgtgcgccagtaagtgtcctggttaaccgactgcaagctgcaccggaagaagatttacggccaaccttaacgggaaaaccgctgagcgaagaagttcaggaagtgctggaagaacgcgatgcgctatatcgcgaagttgcgcatattatcatcgacgcaacaaacgaacccagccaggtgatttctgaaattcgcagcgccctggcacagacgatcaattgttgattttcgagcgcctatacttaacgttcatcccgtgaaataaggaagaacgatgccaacgaaaccgccttatcctcgtgaagcatatatagtgacgattgaaaaaggaaagccaggacagacggtaacctggtaccaactcagagccgatcatcctaaaccagacagcttgatcagtgaacatccgaccgctcaggaagcgatggatgcgaaaaaacgctatgaggaccctgacaaagagtgaccgcatcagactgctcggaagggattctgagtgccactacaagggatctgcgtcacatttttcataattcatgtttttctaataattagaatattaaacaataacaatccattactggaatcatttggaatctttacattatgccgtgcacgtctgctgctacgctttttgtcatttgtagcacaagtaagtgtcagcagtggtgcttcacacttgcccggtaattaacgacgaaagaaaagtaaggtggatgaacaatgagtgcgagcttggcgatcctgaccatcggcattgtacctatgcaggaagttttgccgctcctgacggaatacattgacgaagataatatttcccatcatagcctgctggggaagttaagtcgtgaagaagtgatggcggagtacgcgccagaagcaggcgaagacaccattctcacattattaaatgacaaccagctggcccatgttagccgtcgcaaagtggagcgtgacctgcaaggtgtggttgaagtgctcgataatcagggttatgacgtcattttattaatgagtacagcaaacattagtagtatgactgcgcgtaatacgatctttcttgagccgagccgaatattgcctccactggtttcctctattgttgaagatcatcaggtgggggttatcgttccggttgaggagatgctgcccgttcaggcgcaaaaatggcaaattttgcagaaaagcccggtatttagtttgggtaaccccattcatgatagtgaacaaaaaatcattgatgccgggaaagaattactggcaaaaggggctgatgtcatcatgctggattgtttaggatttcaccaacgtcatcgcgatttactgcaaaaacagctcgatgttcctgtcttgctgtctaacgtattgattgcacggctggctgcggaattactggtgtaattttgcgtgacagccagcgcctctggcccctatagtgaagtagatgttcaactaccaaacagggccagtttatgcttcaaagtaatgagtacttttccggcaaagtgaaaagtatcggcttttccagcagcagcactggtcgcgccagcgtgggtgttatggttgaaggcgaatacaccttcagcaccgctgagccggaagagatgacggtaatcagtggcgcgctgaatgtgttactgcctgacgcgaccgactggcaggtgtatgaagccggtagcgtgtttaatgttcccggtcacagtgagtttcatctgcaagttgccgaacccacctcttatctgtgccgctatctgtaattcctcgccttccccttgaacgggagggcatttttctgaaatatcctttctttagcccataataatatttcctttgctgcgattttttcaatttccgatatattcataatttatcaaggttgatataaatatcagtgaagatctccagatattgttgcggaactggctacgataaaagataaatcagatgatgaatggtggcgtgcattgctgcaaagtcgcaatgatcatttacgccaaacggcattgcgcaacgcacataccccggcgttgttgttaacgacattgactgagcctcaggatcggagcctggctattaataatccacagctggctgccgatgtgaaaacggcgtggttaaaagaggatccaagtttactcttatttgtcgaacaacccgatcttagcctgttacgtgatttagtgaaaaccggggcaacgcggaaaattcgcagtgaagcgcgtcaccggcttgaggaaaaacaatgacacaacgtccatggagcaagttacagcgtaaaacgcataatattgctgcgctaaaaattattgctcgccgtagcgaataattatatgcctggtgtggcttcgtacgccggataagacgcggcaggcgtcgcatccggcattaaaggaaaatcagcaattaacgttgtgcttcgccacctaatccttcaatcaggttttgaattaacgctgccagttcaccagtcatcaggatgaaatcggcatcaaaacgctgggcgaaatcttcacggtcgatatcttcgttttgatcgcgcagctcgtcgcagaacttcagacgcttgaggctaccatcgtcgcacatcacaaactgaatgcgctgctgccagtcgagcgccagtttagtcaccacttttccggcttcaatgtgattggtgatctcttcgctggtcagatcttgtttcttcgcgcggatcacgccgccatcttccagcaagcttttcagctcggcttcatcaagcagctggaagccctgtgccgcactaccggagcgaacccattcggtcagcgtcagttcaatcgggttttccatgctcaatggtacaaccggtaagctccccaggcttttacgcagtaatgccagcgtatcttccgcttttttggcactggcgcagtccaccataatcaaaccgttaaccgtgtcgatccacatcattgtctggctaaaacggctgaaagcacgcggcagcagagagtgcagcacttcgtctttcaggctatctttttcggttttcttcagcttacgcgcctgttccgcttccagtttggcgattttcgcttccagcgcctgtttaatcaccggagacgggaggattttttcttctttgcgcgcgcagataacaatttgaccattggcaacgtgcgttaacgcatcgctgtggcttcccatcggaggaacccagcccatcttcgccatgtcctggctgccgcatggggtaaatgccatgctggctagctgtttttccatctcttctgcacgcaggctaatctcgcggctaagacggtaaaccattaaatttttgaaccacagcatgataatttccacggccttgtcgttaaatttagcgggcatgataacgaattgtcggcggccttgcattgccaatccggttgtccgtctctacgctattgatattgaaaaaaataaggagagtaccgtgcgtataggtatcgatttaggcggcaccaaaactgaagtgattgcactgggcgatgcaggggagcagttgtaccgccatcgtctgcccacgccgcgtgatgattaccggcagactattgaaacgatcgccacgttggttgatatggcggagcaggcgacggggcagcgcggaacggtaggtatgggcattcctggcagtattagcccttacaccggtgtggtgaagaatgccaatagtacctggctcaacggtcagccattcgataaagacttaagcgcgaggttgcagcgggaagtgcggctggcaaatgacgctaactgtctggcggttagtgaagcagtagatggcgcggcagcgggagcgcagacggtatttgccgtgattatcggcacgggatgcggcgcgggcgtggcattcaatgggcgggcgcatatcggcggcaatggcacggcaggtgagtggggacacaatccgctaccgtggatggacgaagacgaactgcgttatcgcgaggaagtcccttgttattgcggtaaacaaggttgtattgaaacctttattagcggcacgggattcgcgatggattatcgtcgtttgagcggacatgcgctgaaaggcagtgaaattatccgcctggttgaagaaagcgatccggtagcggaactggcattgcgtcgctacgagctgcggctggcaaaaagcctggcacatgtcgtgaatattctcgatccggatgtgattgtcctggggggcgggatgagcaatgtagaccgtttatatcaaacggttgggcagttgattaaacaatttgtcttcggcggcgaatgtgaaacgccggtgcgtaaggcgaagcacggtgattccagcggcgtacgcggcgctgcgtggttatggccacaagagtaaaaaacgtaggcaattggcgcatcatgcctgatgcgacgcttgccgcgtcttatcaggcctacaaaaggtgccagaaccgtaggccggataaggcgttcacgccgcatccggcaataagtgctccgatgcctgatgcgacgcttgccgcgtcttatcaggcctgcaaaatgtgccagaaccgcgtagggcggataaggcgttcacgccgcatccggcaataagtaatgagcaccgagactataacttaccccagtggtttcgccagcaccggagtatccgccgcttgctggcgcttatagcgaccatacagcagcaagctgctcatcgcagcaaagctaagcagggcggcaggcagcgccacgtaattatatgccagccccagcgtcagcatcatacctccgcaatatgcgccgacggcgctaccgaggttaaacgctatttgcccacctgcggcacctaataactctccgcctttggcgttttgtagtaacaatatttgtagcggtgcactaagggcaaataatcccgcgcaacaaataaaagcaaaaataaggctcgttgttttcatgccgccgcagaaaaagagcatcagcagtgccagtacaattataaagtcagtcactgctgcaatgcgcagtggactataacgtccactaatcctgccacttagcatatttcccagcaccatccctagcccaactaacatcataataaaggtcatcgccgtttcgctaaaaccggaaataaacatcatgtatggctttacgtagctgaaccaggcaaacacacctgcgttgccaaacatcgtggcggcgaaaattaaccacggggccgggctgcgcaaaaagtgaaattgttcgcgcagatttcctttcgcctcgtcgcgaatatctggcacccaaaaatagacgcttgccatcaccgcaatattaaaaacagcgatcaataaaaaggtgtaacgccagctaaattcctgacttaaatacgttcccagcggaatgcccagcaaattggcgactgtcatcccggaaaccatccccgccacggcggcggtgacttttccgggtttgataattttacttaacacgatcgctccgacgccaaaaaatgcgccatgcggaaagccggataccagccgaccaatggcgagcatcaggtaagagctagagagcgtgaacatggcgttgccaatgacgcacaacgccaccagaaacaacaagatatgtttgagactgtagcggctggaaaagagtgcgatgattggcgcaccgaccaccacccccagtgcataatagctgatcatatgcccggcggcaggaatgctaattcctacgttatgcgccagctccgtgagcacgcccataatgccaaattcggccatccccaaaccaaacgtgcccagagccaaagataaaatgacttttttcataccaccatcacaaccaccagaacggctaccaatcaccgtagccaataaagtgatagcttgcaggataacgaccagcaaggccaagagataattcgcccctctgtattcattatcctgctgaatagttatttcactgcaaacgtactttccagtttgctgtagcccaggccgttgatctttttcactttgatctgcaccggaatacgctctttcatcgcttctacgtggctaatcacaccgatggttttgccactggcgttcagggcatccagcgcatcaagggcggtatccagcgtttcgctatccagcgtgccaaaaccttcatcaaggaacaggctgtcaatacgtgttttatggctgaccagatcgctaagcgccagcgccagcgccagactaacgaggaaactttcgccgccggaaagggtacgggtatcgcgtaccgcatctgcctgccaggtatcaacaacctcgacttccagcgcctcgctggctttgcgctgtaacagatagcgcccgtgcagccgggtaagttgctgattagcgagatggactaaattatccagcgtcagcccctgggcaaacttgcggaatttatcgccctctttggaacctattaggctattcagatatccccagtcctcaacctgctgcgtcatttgagcaatttgctgcattaaggtttgttgttgctgacggttatctgcatcctgcttcagctgctggcgaatctcgccttgactcgtggtgttttcacgcaacttttggtgagtttgcgctaactcttgctgaatctgctccaccgtcacagtgagagccaacccgtcgtcaggtcggtgttgttgatgctgtgccagcgtttctgctgtctgagtgaccagagtttgcgcctgacggcgctggttttccagattctgcttgagctgttccagctgcgttagtgtttgttcatccattagcgccgcaaggaacgcctgctgatcgtcaaagacgctggcctgtagcgcggtgtcaaactgcgcctgggctttttgcagactttgcgccgccagaacatcctgttgctgtaacgtctgctgctggctgtgtaatgcgagacattgttcatgtacctgccgccagttttccaataccacagtttcttcgcagtgcgggagttcatcactttgcggcaacgtttccagaatcggcgtcagctgctgaatacggttttgcagcgcggttaattcgttctggcgttgctgccagctctgcgcttcttgctgacgtgtcgccaaccagctctcttcttcatcttcctgtggcaatgtcagtgcataacccgtcaatgtcgttaaaagtagttgctggcgttgttcaatttgctgttgatactggataatttgctgattatgcgcggcaatctgcccttgtaattcatgccgttggctgagtaaccgcagctggcgttcgtgctcatcttgtgcatccagccacggttgaatatcgtccagtggctgcaaggtgatattgaggctggccgtgacggcttgccattgttgagtaagtgcttgctcatcttgtcggaggctttgcgcttcgttttcatcacgctgaagctgctttgttatggcgtccagttgcccacgtagcgtcgcaccttcttcaccgagctttttaacttcgttttccagcgccagtaatcgagactgattaacgccaggctccagcgcctgatacgcctcgaccgccgggtggctggtggaaccacaaagtgggcaaggctgacccgcctgtaactgtgcacgttgagcttccagcgttttgatgcgcgcttcctgctcgcaaatggttttcacatcggcaagttgctgcgtcttttctttataacgctggcgcatttcgttaagtgcggcgttacgttgcgtctgttcttgcgtgacattctggatagcgacctgtaactgcgccagacgtttttgttggggaacaatctgtccatgcagcgcgaccaggtgctgacgcagtgggcgttgctcagcatgttgcgccagggcggtagcaacttcatcggcggttaacgtcaacgtgatcgccgcaagcgcattaagtttttgctcagcatgggttaactgttgctgccattgccgcagatgctcgcgatcgctggtttgttgggagaactgcgcacgccaacccgccggttcgttgttccactgacggaagcggtcgtgttcctgtaaccaggtattcaggctttgttgctgctgctgtaattctgcactctgcttcgccgcgtggtggcgaatgctcgcgcgaagcgccattgtgctctgtaagcgagtatttacttcttcaatctgctggcgaatatgcgccagcgccgcgctgtgttctgcgatgcgttcccagtgtggacgaagatttcgtgccggttgtgccagactaagcgccgccagttgaggttgcgctttttcttcttcggctaacgcctgttgcaaggcctgctgacggcggctggcttcttgctgcaattcgtcctgacgcgttaaccagtttaggctttgttgttcttgctgctgcgcggtaattaactgtttttcttcgtcagtaagtacctgcaaactcgctgtcaggctttgcacttgttccggcgtgagcaacgtgacgccgctggcctgcgcttgcagcttctccagctctgtgcgggcgcttttgtgctgctcaaaaaccatcgcgctgatttgcccgtagatttcagtgccggttaactcctcgagcaattccgcgcgttctttgggtttggcattcaggaaggcagcaaattgcccctggctaagcagcatgctacgggtgaagcgcccgtaatccagcccggttaacgtcgctgtcagttccagcttatctttcactttgtcggcgagaattttgccgtcggcgcagcgcgccagctctacgcgtggcacctgcaaattaccgtcgggttggttacgcgcccgattctggctccagaatgcacggtacgcttcacctttcacttcaaactccacctccgccagacattcggcggtatcgcgggtcatgagatcattttggctttgactaacgttagagagacgcggagtttcgtgatacagcgccagacaaatggcgtccagcagggtggttttccccgcacctgttgggccggtaatagcaaacagcccgttgctggcgaacggctcgcgggtgaaatcaatcttccattcgccttttaaactgttcaggtttttcaggcgcaggctgagaattttcatgcttcgtgttctccggcgagggtatgcaacgtcgtggtgaaaagatgctgcagacgttgctgctggctttcatccagttcttccagtgccagacggcgattgaacacctcttcgacgctgagttcgctgagggtttcacgctgttggctggctaacacacgctcgcgctgttcacgactccgacgtaccagcaatacttcgacaggcaaactttcggttaatgcctggattttgcgctgaatatcatgcagatactcatcagtagtgatttcgatatccagccagacaggtggctcctggcttacatcgcgccactgttccagctgtgcggtaatgctcgccagatcgcctttcagcactgccatgggttgcgttaccggtacgttcaggttttccacgctctctaatttgccgttactaaatgtcaccagatggacatatttactcttaccgcattcatcaaaactcagtggaatgggggagccgcaatagcgaacatgttccatgccgccaataatctgtgcgcggtgaatatgcccgagcgcgatgtagtcggctggtggaaagttttgtgccggaaacgcgtccagcgtgccaatataaatgtcacgcacggcgtcacttttactggcccccacggtcgttaaatgtcccgtggcgatgatgggcagaggctgatcgccgcgcagtttgcaggcatcggcatagtgttgttggtaataatcggtaatcgctgccagtaaatgctgctgtttttcaataccgttaagccccgcctggctggtaataatgtcacgcggacgtaaaaacggaatggggcacagcactgcgcctggcgtcccgtcgcgacgaggcaagatttgcggcgcatgtccggcgctggcgaccacggtagtattgaggaacgccatgatatcgcggctttcattcagcgtggcgacgctgtcatggtttcctgccagtaccaccagatgacagccagtttgctgtaaattgacaacaaaacggttgtataacgtgcgggcgtaactgggcgggctgccggtatcgaaaacatcaccggcaacaataatcgcatccacctgatgggtttgtgctgtctccagcagccagtcaagaaaagcctgatgttcagcttcgcggcttttactgtagaagttctggccgagatgccagtcactggtgtgaaggatgcgcataacggttccctggcgaaaaagcatgggcgcgattatacccaaacagatgtgccatttgcttttttctgcgccacggaaatcaataacctgaagatatgtgcgacgagcttttcataaatctgtcataaatctgacgcataatgacgtcgcattaatgatcgcaacctatttattacaacagggcaaatcatggcgagacgtattctggtcgtagaagatgaagctccaattcgcgaaatggtctgcttcgtgctcgaacaaaatggctttcagccggtcgaagcggaagattatgacagtgctgtgaatcaactgaatgaaccctggccggatttaattctcctcgactggatgttacctggcggctccggtatccagttcatcaaacacctcaagcgcgagagcatgacccgggatattccagtggtgatgttgaccgccagaggggaagaagaagatcgcgtgcgcggccttgaaaccggcgcggatgactatatcaccaagccgtttagcccgaaggagctggtggcgcgaatcaaagcggtaatgcgccgtattagcccaatggcggtggaagaggtgattgagatgcagggattaagtctcgacccgacatctcaccgagtgatggcgggcgaagagccgctggagatggggccgacagaatttaaactgctgcacttttttatgacgcatcctgagcgcgtgtacagccgcgagcagctgttaaaccacgtctggggaactaacgtgtatgtggaagaccgcacggtcgatgtccacattcgtcgcctgcgtaaagcactggagcccggcgggcatgaccgcatggtgcagaccgtgcgcggtacaggatatcgttttagtacccgcttttaacgccttgctcatcggacgcagagcagggcttatgatttcttaactggagtatcttacgtgctggaacggctgagctggaaaaggctggtgctggagctgctactttgctgcctcccggctttcatcctgggtgcattttttggttacctgccctggtttttgctggcaagcgtaacaggactgcttatctggcatttctggaatttattgcgccttagttggtggctgtgggtggatcgcagtatgaccccgccaccggggcgtggtagctgggaaccgctactatacggcttacaccagatgcagctgcgaaataaaaaacgccgccgtgaactgggcaatctgattaaacgctttcgtagcggcgcggagagcctgcccgacgcggtggtgctgaccacggaagagggcggtattttctggtgtaacggtctggcgcaacaaattcttggtttgcgctggccggaagataacgggcagaacatccttaacctactgcgttacccggagtttacgcaatatctgaaaacgcgtgatttttctcgcccgctcaatctggtgctcaacaccgggcggcatctggaaattcgcgtcatgccttatacccacaaacagttgctgatggtggcgcgtgatgtcacgcaaatgcatcaactggaaggggcgcggcgtaacttttttgccaacgtgagccatgagttacgtacgccattgaccgtgttacagggttacctggagatgatgaatgagcagccgctggaaggcgcggtacgcgaaaaagcgttgcacaccatgcgcgagcagacccagcggatggaaggactggtgaagcaattgctgacgctgagcaaaatagaagccgcaccgacgcatttgctcaatgaaaaggttgatgtgccgatgatgctgcgcgttgttgagcgcgaggctcagactctgagtcagaaaaaacagacatttacctttgagatagataacggcctcaaggtgtctggcaacgaagatcagctacgcagtgcgattagcaacctggtctataacgccgtgaatcatacgccggaaggcacgcatatcaccgtacgctggcagcgagtgccgcacggtgccgaatttagcgttgaagataacggaccgggcattgcaccggagcatattccgcgcctgaccgagcgtttttatcgcgttgataaagcgcgttcccggcaaaccggcggtagcggattagggttagcgatcgtgaaacatgctgtgaatcatcacgaaagtcgcctgaatattgagagtacagtaggaaaaggaacacgtttcagttttgttatcccggaacgtttaattgccaaaaacagcgattaatccgcctttgtcatcttttattgccataagccagtcgatgctggcttattttctttgcagtcaaaatacgggcgttagattttacaacgattggtgattttttgttcgcatgattagccatgtctttttcacggaaatagtgttttatactggttggtgatttcttatcgctatatacctctggtttttagatccctccttgctttaaaacgttataagcgtttaaattgcgcttcaggtgctgtcatactgactgcattaacgcggtaaatcgaaaaactattcttcgccgcgcctggttgggagtatttcccgctaaaattgtttaaatataccgctgtatcatccccagggattggcacaaaaatttaacgttacaacaccacatccacaggcagtatgatttatgacccatcaattaagaagccgcgatatcatcgctctgggctttatgacatttgcgttgttcgtcggcgcaggtaacattattttccctccaatggtcggcttacaggcaggcgaacacgtctggactgcggcattcggcttcctcattactgccgttggcctgccggtattaacggtagtggcgctggcaaaagttggcggcggtgttgacagcctcagcacgccaatcggtaaagtcgctggcgtactgctggcaacggtttgttacctggcggtggggccgcttttcgctacgccgcgtacagctaccgtttcctttgaagtggggattgcgccgctgacgggtgattccgcgctgccgctgtttatctacagcctggtctatttcgctatcgttattctggttagcctctatccgggcaagctgctggataccgtgggcaacttccttgcgccgctgaaaattatcgcgctggtcatcctgtctgttgccgctattgtctggccggcgggttctatcagcacggcgactgaggcttatcaaaacgctgcgttttctaacggcttcgttaacggctatctgaccatggatacgctgggcgcaatggtgtttggtatcgttattgttaacgcggcgcgttctcgtggcgttaccgaagcgcgtctgctgacccgttataccgtctgggctggcctgatggcgggtgttggtctgactctgctgtacctggcgctgttccgtctggggagtgacagcgcgagcctggtcgatcagtctgcaaacggcgctgctattctgcatgcttacgttcagcacacctttggcggcggcggtagcttcctgctggcggcgttaatcttcatcgcctgcctggtaacggcagttggcctgacctgtgcttgtgcagaattctttgcccagtacgtaccgctctcttatcgtacgctggtgtttatcctcggcggcttcagcatggtggtttctaacctcggcttaagccagctgatccagatctccgtaccggtgctgaccgctatttatccgccgtgtatcgcactggttgtattaagttttacacgcagttggtggcataatagctcccgcgtgattgctccgccgatgtttatcagcctgctttttggtattctcgacgggatcaaagcatctgcattcagcgatatcttaccgtcctgggcgcagcgtttaccgctggccgaacaaggtctggcgtggttaatgccaacagtggtgatggtggttctggccattatctgggatcgcgcggcaggtcgtcaggtgacctccagcgctcactaaatcactgaacatttgttttaaccacggggctgcgatgccccgtggttttttattgtgttgatgggttaggaattgatggaaagtaagaacaagctaaagcgtgggctaagtacccgccacatacgctttatggcactgggtagtgcaattggcaccgggctgttttacggtagcgcagacgccatcaaaatggccggtccgagcgtgttgttggcctatattatcggtggtatcgcggcgtatatcattatgcgtgcgctgggggaaatgagcgtacataacccggccgccagctctttcagccgttatgcgcaggaaaacctcggcccgctggcaggttacattaccggctggacctactgctttgaaatccttattgtcgccatcgccgatgtgaccgcttttggtatctatatgggtgtctggttcccgacggtgccgcactggatttgggtactgagcgtggtgctgatcatttgcgccgtaaacctgatgagcgtgaaggtattcggtgagctggaattctggttcagcttctttaaagtcgccaccatcatcatcatgattgtcgccggtttcggcatcatcatctgggggattggcaacggcgggcaaccgaccggtattcataacctgtggagcaacggcggcttcttcagtaacggctggcttggcatggtaatgagcttgcaaatggtgatgtttgcttacggtgggatcgaaattatcgggattaccgccggtgaagcgaaagatcctgagaaaagcataccgcgtgcgattaactccgtgccgatgcgtattctggtgttctacgtcggtacgctgttcgtcattatgtctatctacccgtggaatcaggttggcactgccggtagcccgttcgtgctgacgttccagcatatgggcattacctttgccgccagcattcttaactttgttgtgctgactgctagcctgagcgcaattaacagtgatgtatttggcgtaggccgtatgctccacggtatggcagagcagggcagcgcgccgaaaattttcagcaaaacgagccgtcgcggtattccgtgggttacggtgctggtgatgactaccgcgctgctgtttgcggtgtatctgaactacatcatgccggaaaacgtcttcctggtgatcgctagcctggcaaccttcgccacggtgtgggtgtggattatgatcctgctgagccaaattgccttccgtcgccgtttgccgccagaagaagttaaggcgctgaaatttaaagtgccgggtggggtagcaacgaccatcggcgggctgattttcctgctctttattatcgggttgattggttatcacccggatacgcgtatcagcctgtatgtcggtttcgcgtggattgttgtgctgttgattggctggatgtttaaacgccgccacgatcgtcagctggctgaaaaccagtaatccttgcgttctgtaagccggttcaggaggaaatcctgatccggctattccgaaagttatccgcccccgtcctcctcccccaaatatccttcagatgatgagtgatcctgcattaggctatggcaaggtgatcagattttcatcacaggggaattatgatgttaaatgcatggcacctgccggtgcccccatttgttaaacaaagcaaagatcaactgctcattacactgtggctgacgggcgaagacccaccgcagcgcattatgctgcgtacagaacacgataacgaagaaatgagtgtaccgatgcataagcagcgcagtcagccgcagcctggcgtcaccgcatggcgtgcggcgattgatctctccagcggacaaccccggcggcgttacagtttcaaactgctgtggcacgatcgccagcgttggtttacaccgcagggcttcagccgaatgccgccggcacgactggagcagtttgccgtcgatgtaccggatatcggcccacaatgggctgcggatcagattttttatcagatcttccctgatcgttttgcgcgtagtcttcctcgtgaagctgaacaggatcatgtctattaccatcatgcagccggacaagagatcatcttgcgtgactgggatgaaccggtcacggcgcaggcgggcggaagtacgttctatggcggcgatctggacgggataagcgaaaaactgccgtatctgaaaaagcttggcgtgacagcgctgtatctcaatccggtgtttaaagctcccagcgtacataaatacgataccgaggattatcgccatgtcgatccgcagtttggcggtgatggggcgttgctgcgtttgcgacacaatacgcagcagctgggaatgcggctggtgctggacggcgtgtttaaccacagtggcgattcccatgcctggtttgacaggcataatcgtggcacgggtggtgcttgtcacaaccccgaaagcccctggcgcgactggtacagctttagtgatgatggcacggcgctcgactggcttggctatgccagcttgccgaagctggattatcagagcgaaagtctggtgaatgaaatttatcgcggggaagacagtattgtccgccactggctgaaagcgccgtggaatatggacggctggcggctggatgtggtgcatatgctgggggaggcgggtggggcgcgcaataatatgcagcacgttgccgggatcaccgaagcggcgaaagaaacccagccggaagcgtatattgtcggcgaacattttggcgatgcacggcaatggttacaggccgatgtggaagatgccgccatgaactatcgtggcttcacattcccgttgtggggatttcttgccaataccgatatctcttacgatccgcagcaaattgatgcccaaacctgtatggcctggatggataattaccgcgcagggctttctcatcaacaacaattacgtatgtttaatcagctcgacagccacgatactgcgcgatttaaaacgctgctcggtcgggatattgcgcgcctgccgctggcggtggtctggctgttcacctggcctggtgtaccgtgcatttattacggtgatgaagtaggactggatggcaaaaacgatccgttttgccgtaaaccgttcccctggcaggtggaaaagcaggatacggcgttattcgcgctgtaccagcgaatgattgcgctgcgtaagaaaagtcaggcgctacgtcatggcggctgtcaggtgctgtatgcggaagataacgtggtggtatttgtccgcgtgctgaatcagcaacgtgtactggtggcaatcaaccgtggcgaggcctgtgaagtggtgctacccgcgagtccgtttctcaatgccgtgcaatggcaatgcaaagaagggcatgggcaactgactgacgggattctggctttgcctgccattagcgctacggtatggatgaactaacgttttataacgccttgcgactcgcctgcgccatcatccgcggataaaactgccagaagcgggtttcgagggcgtcataatgagcgtctaaatcgtaccaggagtcacgcagggcatccagacgtgggcggcggcttgccatgccgtttaacacgttctggatgaaatccatatcgcgatagcgcaccagccactgctcactccacaagtaattgttcagattgataaaacgtggcggactgtccggcaaaatcgtcatcacttgctcgcgggcataacagacaaattcctgtagcggaaagtccgggctcagctggctccagtggcgggaaagaaagtgatcccacatgacatccagcgtaataggcgcaacgcggcgcgtttcactacgaaaccactcccgtgcttcgcggacttccggcagattgtcagtcaatacgtcgatacgtcgatgcatatgaatgccagccacgacgtcgggcggaaaactttcttcaggatttccgcgtacgaaatcagccagtaaattgccggaaaggctgctttccgcgagatgggctaaatgcaggtgagctaaaaaattcatcgattatattctatccaaaagggggtaaaggttgcagggagagcgccccggcactagactacccgcctcttattttagtctgagtcagtgtcatgcgcgttaccgatttctcctttgaattgcccgaatccctgattgcccactatcccatgcctgaacgcagtagctgtcgtttactgagcctggacgggccgacgggcgcgctgacgcacggtactttcaccgatttacttgataagctcaaccccggcgatcttctggtttttaataatacccgcgtgatcccggcgcgcctgtttgggcgtaaagccagcggcggcaagattgaagtgctggttgaacggatgctcgacgacaaacgcattcttgcgcatattcgcgccagcaaagcgccaaaacctggcgcagaactgctgctgggcgatgacgaaagtattaacgcaacaatgaccgcgcgccacggcgcactgtttgaagtcgaatttaatgatgaacgcagcgtgctggatattctcaacagcatcggccatatgccgctgccgccgtatatcgaccgtccggacgaagacgctgaccgcgaactttatcaaaccgtttatagcgaaaaaccgggcgcggttgcagccccgaccgcaggtctgcattttgacgagcctttgctggaaaaattgcgcgccaaaggcgtggagatggcgtttgtgacgttgcacgttggtgcgggcaccttccagccggtgcgcgtcgacaccattgaagatcacatcatgcacagcgaatacgctgaagtaccgcaggatgtggtagacgcggtactggcggcgaaagcgcgcggtaaccgggtgattgcggttggcaccactagtgtacgtagcctggaaagcgcggctcaggcagcgaaaaacgatctcattgaaccgttcttcgacgatacccaaatctttatctatccgggcttccagtacaaagtggtcgatgcgctggtgacgaacttccacttgccagagagcacgctgattatgctggttagcgcctttgccggttatcaacacaccatgaacgcctataaagcagcggtagaagagaaatatcgcttttttagttacggtgatgcgatgtttatcacgtacaatccgcaggcaattaatgagcgcgtcggggagtaattccgcggcgctggtttaaaacgttggactgtttttctgacgtagtggagaaaaaatgaaatttgaactggacaccaccgacggtcgcgcacgccgtggccgcctggtctttgatcgtggcgtagtggaaacgccttgttttatgcctgttggcacctacggcaccgtaaaagggatgacgccggaagaagttgaagccactggcgcgcaaattatcctcggcaacaccttccacctgtggctgcgcccgggccaggaaatcatgaaactgcacggcgatctgcacgattttatgcagtggaaggggccgatcctcaccgactccggcggcttccaggtcttcagccttggcgatattcgtaaaatcaccgaacagggcgtgcacttccgtaacccgatcaacggcgatccgattttcctcgatcctgaaaaaagtatggagattcagtacgatcttggtagcgatatcgtcatgatctttgatgagtgtacgccgtatcctgctgactgggattacgcaaaacgctccatggagatgtctctgcgttgggcgaagcgtagccgtgagcgttttgacagtctcggaaacaaaaatgcgctgtttggtatcatccagggcagcgtttacgaagatttacgtgatatttctgttaaaggtctggtagatatcggttttgatggctacgctgtcggcggtctggctgtgggtgagccgaaagcagatatgcaccgcattctggagcatgtatgcccgcaaattccggcagacaaaccgcgttacctgatgggcgttggtaaaccagaagacctggttgaaggcgtacgtcgtggtatcgatatgtttgactgcgtaatgccaacccgcaacgcccgaaatggtcatttgttcgtgaccgatggcgtggtgaaaatccgcaatgcgaagtataagagcgatactggcccactcgatcctgagtgtgattgctacacctgtcgcaattatagtcgcgcttacttgcatcatcttgaccgttgcaacgaaatattaggcgcgcgactcaacaccattcataaccttcgttactaccagcgtttgatggcgggtttacgcaaggctattgaagagggtaaattagagagcttcgtaactgatttttaccagcgtcaggggcgagaagtaccacctttgaacgttgattaatattaataatgagggaaatttaatgagcttttttatttctgatgcggtagcggcaacgggtgcaccggcgcaaggtagcccgatgtctttgattttgatgctggtggtattcggtctgattttctatttcatgatcctgcgtccacagcagaagcgcaccaaagaacacaaaaagctgatggactccattgccaaaggtgatgaagttctgacgaacggtggcctggttggtcgcgtaaccaaagtagcggaaaacggctacattgctatcgcgctgaatgacaccactgaagtagttattaaacgtgacttcgtagctgccgtcctgccgaaaggcaccatgaaggcgctgtaattaaaatttttccctaagggaattgccgtgttaaaccgttatcctttgtggaagtacgtcatgctgatcgtggtgattgtcatcggtctgctgtatgcgcttcccaacctgtttggtgaggatccggctgttcagatcactggtgcgcgcggagtcgccgccagtgagcaaacgctgatccaggtccagaaaacgttacaagaagaaaaaataactgctaagtctgtggcactggaagagggcgctattcttgcgcgcttcgactccactgacacccagttgcgcgctcgtgaagcattaatgggcgttatgggtgacaaatacgtcgtggcgcttaaccttgccccggcaacgccgcgctggctggcagctattcacgctgagccgatgaagctcggccttgacctgcgtggcggcgttcacttcctgatggaagtggatatggacaccgcgcttggcaaactccaggaacaaaatatcgatagcctacgcagtgacctgcgcgaaaagggcatcccgtataccactgttcgtaaagaaaacaactacggcctgagcatcactttccgcgatgctaaagctcgtgatgaagccattgcgtatctgagcaagcgccatccggacctggtgattagcagccagggcagcaaccagctgcgtgcggtaatgagcgatgctcgtctgagtgaagcgcgtgaatatgcggtgcagcagaacattaatatcctgcgtaaccgtgtaaaccaacttggcgtggcggagccggtggttcagcgtcagggtgctgaccgtatcgttgttgaactgccaggtattcaggacactgcgcgtgcgaaagagattctgggtgcgacggcaacgctggaattccgtctggtaaacaccaacgttgaccaggccgctgcggcatccggtcgcgtaccgggcgactctgaagtgaaacagacccgcgaaggtcagccagttgtgctgtacaaacgcgtaattctgaccggtgaccatatcaccgactccacttccagccaggacgaatacaaccaaccgcaggttaacatcagcctcgatagcgctggtggtaacatcatgtctaacttcactaaggacaacatcggcaaaccgatggcaaccctgtttgtggagtacaaagacagcggtaagaaagatgcaaatggtcgtgcggttctggtgaaacaggaagaggtgattaacatcgccaacatccagtctcgtctgggtaacagcttccgtatcaccggcatcaacaacccgaacgaagcccgtcagctgagtctgctgctgcgtgccggtgcgttgatcgcgccgattcagattgttgaagaacgtaccattggcccaaccctgggtatgcagaacattgaacaggggctggaggcttgccttgccggtctgctggtttctattctgttcatgatcatcttctataagaagtttggtctgattgcgaccagtgctctgattgccaacttgatcttaatcgtcggcattatgagcctgttgccaggcgcaacgctgagtatgccaggtatcgcgggtatcgtcttaacccttgcggtggcggtcgatgcgaacgtactgatcaacgaacgtattaaagaagagttgagcaacggacgtactgttcaacaggcaattgatgaaggttatcgtggcgcattcagttctatcttcgatgcgaacatcaccacgctgattaaagtcatcatcctgtacgcagtgggtaccggggcaattaaagggttcgcgattactaccggtatcggtgtggcgacgagcatgtttaccgcgattgtcggtacgcgtgccatcgtaaacctgctatatggcggcaagcgcgtcaagaagctgagtatctgaggagtgcgatgtggcacaggaatatactgttgaacaactaaaccacggccgtaaagtctatgactttatgcgctgggactactgggctttcggcatctctggtctgctgttaatcgctgctatcgttattatgggcgtgcgcggctttaactgggggctggatttcaccggtggtacggttattgaaattacgctcgaaaaaccggctgaaattgacgtaatgcgtgatgcattgcaaaaagccggttttgaagagccgatgctgcaaaactttggtagcagccatgacatcatggtccgtatgccgcctgctgaaggcgaaaccggcggtcaggtgttgggcagccaggttctgaaggtgattaacgaatccaccaatcagaatgcagcagtgaagcgtattgagttcgtcggtccgagcgtgggggcagaccttgcgcaaaccggtgcgatggcgttgatggcagcgctgctgtctatcctcgtgtacgtaggtttccgctttgagtggcgactggcggcaggggtggttattgcgctggcgcacgacgttatcattacgctgggtattttgagcttattccatatcgagattgacctgaccattgtggcaagcttgatgagcgttatcggttacagccttaacgacagtatcgtggtaagcgaccgtattcgtgaaaacttccgcaagatccgtcgcggtacgccttacgaaatctttaacgtgtccttgacccagacgctgcaccgtaccttgatcacatccggtactaccttgatggttatcctgatgctgtacctcttcggtggtccggtactggaaggcttcagcctgaccatgcttatcggtgtttccatcggtactgcatcttccatctatgtggcatctgcgttggctctgaaactgggtatgaagcgcgaacacatgttgcagcagaaagtggaaaaagaaggggcggatcagccgagtattctgccgtaatcaagttcccgttgatgttgaaaatcccggtcagaagatcgggattttttttgatgtatggagattgcgaaaatccccgcatcttgggaaactgcgcgtaaccctacatttcatccaggtaacttttcatggctatcatcccaaaaaactatgcgcggttagaaagcggctatcgcgaaaaagcattaaaaatctatccgtgggtctgcggtcgctgttcccgcgagtttgtttattccaacctgcgtgaacttaccgttcaccacattgatcacgaccataccaataacccggaagatggcagtaactgggaattgttgtgtctctattgccacgatcatgagcatagcaaatataccgaagcggatcagtatggtacgaccgttatcgcaggggaagatgcgcagaaagatgtcggtgaagcgaagtacaacccattcgctgacctgaaagcgatgatgaacaagaagaagtgattaaaacgtaaaattgcctgatgcgctacgcttatcaggcctacgttatttcagcaatatattgaatttacgtgcttttgttggccggacaaagcgtttacgccgcatccggcatgaacaaagcacacgttgttaacaatcagaaatgccgggaataaatcccggcattttcataatcagaagttgtaacctactaccaggtaaccaccccagccggtagagcgaacgttgaagttgccgttgccgaagttcagttctgcatcgtcgttccactgaccaccgtcgtgccagtaacgagctacgacagagtagtgccagtgatcgtagttcagagccagaatatggctggaagcgatagagttattagtacgggtcttaataccgttgattgcgttaccgctgtcatcccctaaatcggaaccccagtcgaagttggtgaagccgatgtagctcagctgaccgccccacagatcggtaatcggcacaaagtatttaattttgaaacggtaaccgtcccactcgttttcgttcgctgcgccatagttctgccactggtatttcgcatagacgttcatggacaggctcatcggcaggccagtgtcgatatcggtacccagacccatgtaccaggtgctctggcgaccatctttattacgacccatgtcgtaaatgtagttgttcgcgaagtaccactctttgaacggaccgaagctaaggtcagtattggtcagcttgtcgatggagaaacgtggttcgatttccataaacagcggagaaccgtggttccagatacctttagcatcggagttaccgccgaagaataccggcgcatccgcataaccatagaagtcgaaccagtcttttttagcgaatgcttcgtactcaaggtaggtatcgttgcggatctgcggtccgaaacgggtgtgatagcttccgacaacgttaacgctctggtgccaccagtcggaaagatactgcggtttgtcgttttcagctgcgttgacagtaaaagagctagagagcgccagtaccgcaccggctgccagtaatgtttttttcatatgtatgccactgtttgaaaatcccttgcgggagtgaaaaaggcgcaaattgcgtttctaaatatttcgtatacagaggagcctattataaaaatcattgctcacaaaaatatgtttcgtttcacagttctatcatttacgtaatcgattgcgttcacgtttacacacattcgggcggggattgtactgactttcgcccttgttgcaaacttttactatcaatccaggtgatgtaagcagagtaacaaaatgacggggaaagatgttgcgggacgcacaaaatcgtcccgaaatacgtttactgcataacaggttgaatgtcgtggatacgtacaaagcctaactgatccacagaaatcccctttaactgtaacggaatatcaacatcgctgggggcgaggacgctggcaggggcattaatcaattgattctgcacattgatttcctgaaagttgtctattgttccctgaatttgcccatattcaacagttccgctgaatgcgggcaagggatcattgctctcaccctgaatacgtagtgtaagggtggtgccatctgcatcaggcgtaatattcaccaggctcatacgtaaagtaccgatctggctttccagtcttgccggtgttttcgctccaggcagaaggtaaaccccactgctggattttgcattcagcctgttttgctgagtgattttgactgtttcttgattgagttgcgtcatctcctggttcagcgtgctgacgctgtgtttcatctgtcgcacttcactttgctgcacacaggcgctaaggctgaacaggcttcccagcaggagcagtcgaaaaacgttagtattcataggtcgtccctttctcgtcgcaattagcctaatggtagagggtaaaagcagcgaaagcatcgatcctttatctcaaaagcgttgcgcctttgttgtatcgtcagttcagggtaaaatagatttccgttaaccacctggtcaggacgccgtatgcattgcccattctgtttcgccgtggacactaaggtaattgactctcgtctcgtgggcgagggtagttccgtacgccgccgtcggcagtgtctggtgtgtaatgaacgtttcaccacctttgaagtggcggagctggttatgccgcgtgttgtaaaaagcaacgacgtgcgtgaaccgtttaatgaagagaaattgcgtagcggaatgctgcgggcgctggaaaaacgtccggtgagttccgatgacgtcgaaatggcaatcaatcatattaaaagccagctgcgcgccaccggtgagcgcgaagtgccgagcaagatgattggcaatctggtgatggagcaattgaaaaagctcgataaagtcgcctatatccgttttgcctctgtctaccgcagtttcgaagatatcaaagaatttggcgaagagatcgcgcgcctggaggactaagccgtgcaggacgagtattacatggcgcgggcgctaaagctggcgcaacgaggacgttttaccacgcatcccaacccgaatgtcgggtgcgtcattgtcaaagatggcgaaattgtcggtgaaggttaccaccaacgtgcgggtgaaccacatgccgaagtacacgcgttgcgtatggcgggtgaaaaagccaaaggtgcgaccgcctatgtcacactcgaaccctgtagccatcatggtcgtacgccaccgtgctgtgacgcactcatcgccgctggcgtagcgcgcgtggttgccagcatgcaagatcctaacccgcaggtcgctgggcgtggactttaccgtctgcaacaggctggcattgacgtcagccacggcctgatgatgagtgaagccgagcaattgaataaaggctttctcaagcggatgcgcaccggctttccttatattcagttaaaacttggcgcaagccttgatggtcgcacggcgatggcgagcggcgaaagccagtggatcactagcccccaggcgcggcgtgatgtacaactactgcgcgcgcaaagtcatgccattttaaccagcagcgccacggtgctggcggatgatcctgccttaacggtgcgttggtctgaactggatgaacaaactcaggcgctctatccgcaacaaaatctccgtcagccgatacgtattgtgattgatagccaaaatcgcgtgacgccggtacatcgcattgtgcagcagcccggcgaaacctggttcgcgcgtacgcaggaagattctcgtgagtggccggaaacggtgcgtaccttgctgattccagagcataaaggtcatctggatctggttgtactgatgatgcaactgggtaaacagcaaattaacagcatctgggtggaagcggggccaacgctcgctggcgcattgctgcaggcgggtttagtcgatgagctgattgtctatatcgcacctaaactattaggcagcgacgcccgcggattatgcacgctgccagggcttgagaaattagccgacgccccccaatttaaattcaaagagatacgtcatgtaggcccggatgtttgcctgcatttagtgggtgcatgatctcccggctcgaaagggaagcagcgcacgaaatattatgctaaaatccgcccccctgcggggccatactcgaacccgaaggaagaaaatgaacattattgaagctaacgttgctaccccggacgctcgcgtcgccatcaccatcgcgcgtttcaacaactttatcaatgacagcctgctggaaggtgcaattgacgcactgaaacgtatcggtcaggtaaaagatgaaaacattaccgttgtttgggtgcctggtgcctatgagctgccgctggcggcgggtgcactggctaaaaccggtaaatacgacgcggtgattgcgctgggtacggttattcgtggtggcactgcccactttgaatatgtcgctggtggtgcaagcaacggcctggcgcatgttgcccaggacagcgaaattccggttgcttttggggttctgaccactgaaagcattgaacaagcgatcgaacgtgctggcaccaaagctggcaacaaaggtgcagaagctgcactgaccgcgcttgaaatgattaatgtattgaaagccatcaaggcctgaaattagtaaggggaaatccgtgaaacctgctgctcgtcgccgcgctcgtgagtgtgccgtccaggcgctctactcctggcagttgtcccagaacgacatcgctgatgttgaataccagttcctggctgaacaggatgtaaaagacgttgacgtcctgtacttccgtgagctgctggccggggtggcgactaataccgcatacctcgacggactgatgaagccatacctgtcccgcctgctggaagaactgggacaggtagaaaaagcagtactgcgcattgcgctgtacgaactgtctaaacgtagcgatgtgccatacaaagtggccattaacgaagcgatcgaactggcgaaaagcttcggcgcagaagacagccataagttcgtcaacggcgtactcgataaagcagcacctgtgattcgccctaacaaaaagtgatatccaggccggtagattcacggaagaccgttccatgatcgccggccttttcttttttacctgctgaggcataacgtatggcatgtggcgagttctccctgattgcccgttattttgaccgtgtaagaagttctcgtcttgatgtcgaactgggcatcggcgacgattgcgcacttctcaatatccccgagaaacagaccctggcgatcagcactgatacgctggtggcgggtaaccatttcctccctgatatcgatcctgctgatctggcttataaagcactggcggtgaacctaagcgatctggcagcgatgggggccgatccggcctggctgacgctggcattaaccttaccggacgtagacgaagcgtggcttgagtccttcagcgacagtttgtttgatcttctcaattattacgatatgcaactcattggcggcgataccacgcgtgggccattaagtatgacgttgggtatccacggctttgttccgatgggacgagccttaacgcgctctggggcgaaaccgggtgactggatctatgtgaccggtacaccgggcgatagcgccgccgggctggcgattttgcaaaaccgtttgcaggttgccgatgctaaagatgcggactacttgatcaaacgtcatctccgtccaagcccgcgtattttacaggggcaggcactgcgcgatctggcaaatagtgccatcgatctctctgacggtttgatttccgatctcgggcatatcgtgaaagccagcgactgcggcgcacgtattgacctggcattgctgccgttttctgatgcgctttctcgccatgttgaaccggaacaggcgctgcgctgggcgctctctggcggtgaagattacgagttgtgtttcactgtgccggaactgaaccgtggcgcgctggatgtggctctcggacacctgggcgtaccgtttacctgtatcgggcaaatgaccgccgatatcgaagggctttgttttattcgtgacggcgaacctgttacattagactggaaaggatatgaccattttgccacgccataaagatgtcgcgaaaagtcgcctgaagatgagtaatccgtggcatctacttgctgtcggattcggaagtggattaagcccgatcgttcctgggacgatgggcagcctggcagcgattccgttctggtatctgatgacctttttgccctggcagctctacagcctggtggtgatgctggggatctgtatcggcgtctatctttgtcatcaaacggcgaaagacatgggtgtgcacgatcatggcagcattgtctgggacgaatttattggtatgtggatcacgctcatggcgctgccgaccaatgactggcagtgggttgccgccgggtttgtgattttccgtattctggatatgtggaagccgtggccgatccgctggtttgatcgcaatgtgcatggcggcatggggatcatgatcgacgatattgtcgccggggtgatttccgcaggcatcctgtattttatcggtcatcactggccgctgggtattctgagctaattgtgcaccgatgcctgatgtgacgcttgtcacgtctcatcaggcctggactcttatttaaatcctacgacaggatgcggtttatacggcgtttccagttcggcaatctgttccggcttcaaagtgatatccaccgcgttcaatagctcatcaagctgttcttcgcggctagttccgataatcggtgcggcaatgcccggtttactcaacaaccaggccagcgcaacttgtgctcgtgtcgcccccagttcttcactgacgcctgttaaccgctctgcgatctgcgcgtcattttcatcgctttctttatagagatttttccccacctcatcagacaccagtcgtgcggtagtttctccccacggacgcgtcagacggccccttgccagcgggctccatggaattaccgccacgccctcctgataacacagtggtagcatctcgcgctcttcttcacgataaatcagattgtagtgatcctgcatactgacaaactgcgcccagccgtgctgtttttggagttccagtgcctgagcaaactggctagcgtgcatactactcgcgccgatataacgcgctttcccggcttttaccacgtcgttgagggcttccagcgtctcttcgatcggcgtgttgtaatcccagcgatgaatttgcaggatatcgacataatccatgccgagacgtcgcaggctgtcgtcgatagagcgcaaaatttgcgcacgggataatccttccggtaaatcaccaacgcgatggaacactttggtcgcaacgaccacgtcttcacgacgggcgaaatcccgcagtgcgcgaccgacgatctcttcgctgctgccgtcagaataactgttggcggtatcaaagaaatttatgccgccttccagtgcacgtttaattatgggacggctgctttcttccggcagtgtccatgcgtgattaccgcgatctggctcgccaaaggtcatacagccgaggcaaagtcgggaaacgcgaaggtcggtttttcctaaggggttgtattgcatgctgccactcctgctatactcgtcatacttcaagttgcatgtgctgcggctgcattcgttcaccccagtcacttacttatgtaagctcctggggcttcactcgtttgccgccttcctgcaactcgaattatttagagtctatgaataatttcttaagcatagcaggagtggagtagggattatgccagccaggccttgattttggcttccataccagcggcatcgaggccgagttcggcgcgcatttcttcctgagttccttgcggaataaagaagtccggcaggccaatgttcagcacgggtactggtttacgatgggccatcagcacttcgttcacgccgctgcctgcgccgcccataatggcgttttcttctacggtgaccagcgcttcatggctggcggccatttccagaattaacgcttcatcaagcggtttcacaaaacgcatatcgaccagcgtggcgttcaggctttcggcgactttcgccgcttctggcatcagcgtaccaaagttaaggatcgccagtttctcgccacgacgcttcacaatgcctttgccaattggtagtttttccagcggcgtcagttccacgccgaccgcgttgccacgcgggtagcgcaccgcactcgggccatcgttatagtgatagccggtatagagcatctggcgacattcgttttcatcgctcggggtcataatgaccatttccggtatgcagcgcaggtaagagagatcaaaagcaccctgatgggtttgaccgtcagcaccaacaatgcccgcgcggtcgatggcgaacaggaccggaagcttttgaatcgccacgtcatgcagcacctgatcataggcgcgttgcaggaaagtggagtaaatcgcgacaatgggtttgtacccaccaatcgccagacccgcagcaaaggtcaccgcgtgttgctcggcaattgccacgtcgaagtagcgatccgggaatttacgactaaactcgaccatgccggaaccttcacgcatcgccggagtaatcgccatcagcttgttgtctttcgctgccgtttcgcacaaccagtcgccaaagattttactatagctcggcaaaccgccgctacttttcggcaaacaaccgctggagggatcaaatttaggcacggcgtggaaagtgatcgggtctttttctgccggttcataaccacgaccttttttggtcatgatatgcaggaactgcgggcctttcaggtcgcgcatgttctttagcgtggtgataagccccagcacatcgtgaccgtccaccgggccgatgtagttaaagcccagctcttcaaacaacgtgccaggcactaccatgcctttaatatgttcttcggtgcgtttgagcagctctttaattggcggcacgccagagaaaacttttttcccgccttcgcgcagactagagtaaagcttaccggaaagcagctgtgccagatggttgttgagcgcgccgacattttcggaaatgctcatttcattgtcgttgagaatcaccagcatatcaggacggatatcgcccgcgtgattcatcgcttcaaacgccatgcctgcggtaatcgcgccatcgccaatgacacagacggtgcggcgatttttgccttctttttcggcagcaaccgcaataccaattccggcactgatggaggtactactatgcccgacgcttaatacgtcatattcgctttcgccgcgccacgggaacgggtgcagaccgcctttctgacggatggtgccgattttgtcgcggcgtccggtcaaaattttatgcggataagcctgatgccccacatcccaaatcaattggtcaaacggggtgttgtagacatagtgcagcgccacggtcagttcgaccgtgcccagcccggaggcgaagtgcccgctggaacggctcacgctgtcgagtaaatagcggcgcagttcgtcgcagagtttcggtaaactctctttcggcaacagtcgtaactcctgggtggagtcgaccagtgccagggtcgggtatttggcaatatcaaaactcatcaggggcctattaatacttattgtttatttattacgctggatgatgtagtccgctagcgcttccagtgcgctggtatcgagactctgttcagccagttgtttcaggctctgacgggcatcgtcgatcagatcccgggctttcttccgggcttgctcaagacccagaagtgcagggtaggtacttttaccaagttgctggtcggcaccctggcgttttcccaacgttgcagtatctcccaccacatccaggatgtcatcctgaacctggaaggcaaggccgatgctctctgcatacttgtcgagtaccggcagagcacgacgtcctttatctccggcgcttaatgcaccaaggcgaacggcggcgcgaatcaatgcgccggttttatgacgatgaatacgctcaagcgcgtccagaggtacgtgtttgccttccgcgtctaaatctaatgcctgaccaccgcacattccggcaataccactggcgctcgccagttcagaaatcatgctaattctgtcgcggtcgctcacttccggcatatcggcatcgcttaaaatgctgaacgccagcgtttgtaaagcgtcgccagcgagaatcgcgtttgcttcgccaaacttcacatggcaggttggcaaaccgcgacgcagatcgtcatcatccattgccggtaaatcatcatgaattaaactgtaagcgtggatacactcaacggcggcagcgggtgcgtccagcgtgtttgtgctaacgccgaacatatgaccggtggcataaaccaggaaaggtcgcaggcgcttaccacctaataatgcgccatactgcatggtttcgaccacgggagtgttctgaaagggcagtggggcgataaaacggctcagcgcctggttggcctgcttaacgcaggcttcgagttgctgcggaaagtccattactcattgtccggtgtaaaaggggttagagaggcgtcttcattgtcagacagcagaatttgtacgcgctgttcggcttgttgtaatttggcctgcccctgacgtgccagctgcacgccgcgttcgaactcgttcagcgcctcttccagcggcaggtcgccactttccagacgggttacaatctgttccagctcgctcagcgccttttcaaagctggcgggcgcctcatttttcttcggcataatgaatgtctgactctcaatatttttcgccccgtcatggtaacggactcagggcaaatagcaaataacgcgcaatggtaaggtgatgtgcacagcaaagcgatgttagtggtatacttccgcgcctggatgcagccgcaggtgtgggctgctgtatttttccctatacaagtcgcttaaggcttgccaacgaaccattgccgccatgaagtttatcattaaattgttcccggaaatcaccatcaaaagccaatctgtgcgcttgcgctttataaaaatccttaccgggaacattcgtaacgttttaaagcactatgatgagacgctcgctgtcgtccgccactgggataacatcgaagttcgcgcaaaagatgaaaaccagcgtctggctattcgcgacgctctgacccgtattccgggtatccaccatattctcgaagtcgaagacgtgccgtttaccgacatgcacgatattttcgagaaagcgttggttcagtatcgcgatcagctggaaggcaaaaccttctgcgtacgcgtgaagcgccgtggcaaacatgattttagcagcattgatgtggaacgttacgtcggcggcggtttaaatcagcatattgaatccgcgcgcgtgaagctgaccaatccggatgtgactgtccatctggaagtggaagacgatcgtctcctgctgattaaaggccgctacgaaggtattggcggtttcccgatcggcacccaggaagatgtgctgagcctcatttccggtggtttcgactccggtgtttccagttatatgttgatgcgtcgcggctgccgcgtgcattactgcttctttaacctcggcggcgcggcgcatgaaattggcgtgcgtcaggtggcgcattatctgtggaaccgctttggcagctcccaccgcgtgcgttttgtcgctattaatttcgaaccggtcgtcggggaaattctcgagaaaatcgacgacggtcagatgggcgttatcctcaaacgtatgatggtgcgtgccgcatctaaagtggctgaacgttacggcgtacaggcgctggtcaccggcgaagcgctcggccaggtgtccagccagacgctgaccaacctgcgcctgattgataacgtctccgacacgctgatcctgcgtccgctgatctcttacgacaaagagcacatcatcaacctggcccgccagattggcaccgaagactttgctcgcacgatgccggaatattgtggtgtgatctccaaaagcccgacggtgaaagcagttaaaagcaagattgaagcggaagaagagaagttcgacttcagcattctcgataaagtggttgaggaagcgaataacgttgatatccgcgaaatcgcccagcagaccgagcaggaagtggtggaagtggaaaccgtcaatggcttcggcccgaacgacgtgatcctcgatatccgttctatcgatgaacaggaagataagccactgaaagtcgaagggattgatgtggtttctctgccgttctataaactgagcaccaaatttggcgatctcgaccagaacaaaacctggctgctgtggtgtgagcgcggggtgatgagccgtctgcaggcgctctatctgcgcgagcagggctttaacaatgtgaaggtatatcgcccgtaatttgtggtttttacgtcgcatctggtcagatgcgacgtttgccgcatccgacattactcgtaataattataaatccctgccgccatcaccagttgacttgccacttcatgggctttttcacgcccaaccaacaggtcgataattttcagaccaaagtcgatagctgtacccggcccctggctggtcagcaattttacccgtgcatcccagacgacgcgcttgtccagccattgttcggcgggaattttgtctttcagcgtcgggaagccggtcatattaccaatcgggaagatatcgtgcggcaccagcacggtggctggcgcggcgcaaatagccgcgacgatacgcccggaacggtggaactgtttaacggtttcaaccagcagagtgctatcgcgaaaacactccgcgcctttaatgccaccaggcagcacgatcacgtcatattcgccatcagccacttcgaccagcggcgcatccgccagcagcttcacgccgcggctgcaggtaatcgccaggttaccatcgctggcgacgctggcagtggtgactttgataccgccgcgaaccagcagatcgatagtggtgacggcttcagtctcttcactaccaggggcgaggcaaaccagtgcgcttgcgctcatattcactctcctttctttttttaattaccaggggcgaggcaaaccagtgccgatgcgctcatattcactctcctttctttttaccatttcaaacaggcgggtgttttccggtacggcaatcccatgcgcgcgggcgcggcgtaagagaaaaccattgatatagtcgatttcagtgtggcgcagcgcgcggatatcctgcaacatgctgctgatattttccgctgtggcatcaatcacctgcatcacgtaatcacgcaaatcttctgcactagtatgatgcccttcgcgttcgatcaccgccgcgacttcttcgcatatctgcataatttcttgcggatgatgacgtaattcaccgttcgggcaattccagatggcagtcagtggattaatcacgcagttgactgccagcttgcgccacagctcggcgcgaatattgttatgccaggcaacgtcaggcaacacggtttgcaaaatatccgccagataactgtaatccccgtcctgttgccgtgccgggccaatatgcgtgataccgtttgccacatgaataatgacattgccgtcgcggcgggctgcatgggtggtggtgcccatcagtaatggctgctgaatgttttgcaactcttcgatggtgcccatgccgttgtgaattaacagtattggcgtagttacaggcagtgtggacgcgaggcttttgacggcatcggaaacctgccatgctttcagcgtcaccaggagcagatcgctggtggcgagaaaatcgggatcgttggcggtcaggctttcgttaaatatgctaccatctgtctcaaccagattcacgctacaataaggttgcggtacgcgcagccagccctgaacttcatgaccctgtttgcaaagtgctgtaagccataattgccctaaggcaccgcatcccaatacggtaattttcattgttcctcctcacccgcaaccactccgggtgttcaataaggctatcccttaattgtgcatgctgttgcgactatgcacaattaagggatacgtcctggtgcaggactgtcggttatttaactttgcgggtattatgcttcgcatcaaaaatgaagggagaggaaaagatgccatctttcgatattgtctctgaagttgatcttcaggaagcacgtaacgcggtcgataacgcgagccgcgaagtggagtcccgttttgacttccgtaacgttgaagccagttttgagctgaacgacgccagcaaaaccatcaaagtgttgagcgagtccgatttccaggtcaatcagttgctggatattctgcgtgccaagctgctgaagcgcggcattgaaggcagtagcctggatgtaccggagaatatcgttcatagcggtaaaacctggtttgtggaagcgaaactgaaacagggcattgagagcgcgacccagaagaaaatcgtcaagatgatcaaagacagcaaactgaaagtgcaggcgcaaattcagggcgatgaaatccgcgtaacgggcaaatctcgtgatgatttgcaggctgtcatggcgatggtacgtggtggcgatctcggtcagccgttccagttcaaaaacttccgcgattaatcgcgactatgtgcgttttgttcatgtcagatgcggcatgaacgcctgattcggcctacaaaggtttgtaattcagaaactttgtaggcctgataagcgtagcgcagcaggcaattcgccgcgttttttatgcctgacgaattgcctgttctatctcaaagcgattcgtcactttgctgtcgattttcacataagcactatgttcttcttctgcaatcaacacttctttgatgccttcagtttctagcaaacgcacttttaacgcctcgtttgcggcaatgttcgccgggatttcaatgcgcaaactgctgacatacggcggttctttcatggtactggcgactgtcagccacactgcggccagcattgcgccagcgagaaataccccctgaccgtcaaacatgccgttaatccagccgcccaggctaccgccaatcgccacgccaagaaactggctggtggagtaaacacccatcgccgtacctttgtaacctgctgggctctctttactgataagactgggcaggagggcttccatcaaattaaacgccacaaagaaaagctgcacgccgaccaccagttgccagaactgcgtttgcgcgttccacaacacaatttccgcaaccacgatcaacccgacgcagaagacaaagacttgcttcattttgcgcttaacttcagcgtagataatgaaaggcacgacgctgccaaaggcgattagcattgtcgccagatagaccttccagtgttcagccgccgggaaccctgcatcagccagttgtccgggcagggcaacaaacgtgctcatcagcaaaatatgcagacacataatgccaaagttgagtttcagcagccgcggttccgccagcactttactgaaactgcctttcaccattccggactcacgattaagtacgtgagtgctactgttgggcacaacccaaatggtcaacgcaatgccggtcgttgccagaatagcgatcatccagaacagcgcgtgcagcccaagtttgtgagtgatgatcgggccaagcaccatcgcaatggcaaaggtaatgccaaagctcacgccgataaacgccatcgctttggtgcggttttgttcgcgcgtgagatcggaaagcagcgccataacggcggcggcaattgctccagagccttgtagcgcccggcccagaataattccccagatggagtcggaaagcgcagcgataacgctaccggcggcaaacaccgccagcccaccgacaattaatggtttgcgaccaatgcggtcggaaagcaggccaaacggaatctgaaaaacggcctgagtcagaccataaataccaatggcaataccgattaatgcttcgctggcaccttgcagagccatgccgtacgtggtcagaaccggcagaaccataaacatgcccagcatgcgcaagctgaatacggtccctaaaccccaggtcgcgcgcctctcacctggcgtcattttataatcgttcattaccacctctgttttaaattcgcgactagtgtaaagcggcaaacgaatggggtaaacatgcggattttttagtaaatatttcgagagggatatgtttctaatgctaagaaaaaaggtgccgtagcacctttttaatagagaggttttgttaccacacagcagccagcagcgtatggctgtccggtaccataaaatcaacggacatcatcacgctgagggcagtgatggcgatgatagagaagccgaacagcttgcgcgcccagattctgtcatcagcaactttataaccgcgcagagccatacctaaccaccagacgctaaccgccgcggcgaccaccagatatttatacccagcgtaaccgccaagagagagcatcagcgtggcaacggcaaaggcgatgatatacagcgtgatgtgattcttcgccacgctaatgccttttaccactggcaataccggaatgtttgccgcctggtaatccttaaagcggaaaatggcgatggcataggagtgaggcatctgccacaggctgaagatagccagcaggatcgctgcgccgctatcgaactcaccggttaccgcacagtagccgatcaccggcggcgcagcgccggagaggctaccaatcaacgtgccgtagacagagtggcgtttcatgtacaggctataaacgccgacataaaccacaaagcccatcacccccagccagcaggccagcggattcgcgccaaaccacagcagcataaagccagcaatacccagcaacgtggcgtacaccaggctgacagcaggagagatcaggcctttcaccagcacccgattcttcgtcctttccatctttctgtcgatatccctgtcgatgtagttgttaaacacacaaccgctcgccacaaccagactcaccccaaccagcgtgtagataaacaggggataatcaatgctgcccttactggccagcaggaatcccccaatcacgctgatcaggttgccaaagatgatgcctggtttcgttacttgcaggtattgcttaaacatcataaccgccgctcttagtgcatcatcatgttgtagttgaggttccacataatccagatggagcctacaaccaggatagcgatgattagcacggtgaagacaaacgccgtcatgttccagccttcatcacttttggtattcatgtgcaggaagcacaccagatgcaccagaacctgtaccactgccattgccaggattgttcccagaattacggccggagaggcagctcctgtcatcaccatccagaacggaatcaccgtcagaatgatgctcaggataaagcctgtcatgtaggtttttacgctgccatgggacgcgccgctgtgatcggtagaatgactcattacatcgcccccatcagataaacaacagtgaacacacagatccaaaccacatccaggaagtgccagaacaggctcaggcacatgatgcgggtacggttagtgctggtcaggccgcgacgggcgatttgcaccatcagcaccgccatccagataagaccagaagtgacgtgcagaccgtgcgtgccgaccagcgcaaagaacgcactcaggaagccgctgcgatccggacccatgccgttaacaatcaggtgatggaattcatagatttccatcccgataaatccggcaccaaacaaccaggtcaacgccagccaggagataacctggcttttgttgtttttgtacatggcgatagccgccatgccgtaggtgatggagctgaacaacagcaagaaagtttcaaccagaacgaacggcagttcgaaaatgtccttacctgtcgggccgcctgcggtgccgttcaccagaacggcataggtagcaaacaagatagagaacagaatgcagtcgctcatcaggtagatccaaaatccgaagattttggttccgcctgcatcgtggtgcccgtgttcgtgcgcgtgggcagtcgcgtgcgtcaaagtatcagttgccatttttcagccctgccttagtaatctcatcgaaatgctggttttccagtttttcgatttctgccaccggcacgtagtaatccacgtcctcgtcgaagcttttcacgatccaggtgatgatcatgcctgcgaagccaacaatcgccagccaccagatatgccagatcatggcgaaaccgaagatggtggagaaagctgcaatgacgatacctgcaccgctgtttttcggcatatgaatttcttcatagtggtcaggctttttatacgcttcgcctttctctttcatttcccagaatgcatcacgttcgtgaacgtgcggcactacggcaaagttatagaacggaggcggggaagaggttgcccactccagcgtacggccaccccacgggtcgccagtcaggtcacggttctggtcgcggtcgcgaatagaaacgtacatctgaataacgaggcagagaatacccagcgcaatcagtactgcaccgctggctgcaatcatcagcatggtgtggaactgcgggtcaatctgctggctcaaacgacgggtcatgcccatgaagcccagcgcatacagtggcataaaggcaacgaagaagccgatgatccagaaccagaacgcgcgtttaccccaggtttcgttcagtttgaaaccgaacgctttaggccaccagtaggtcatccctgcgaagcagccgaagaccacgccgccgatgatcacgttatggaagtgcgcaatcaggaacaggctgttatgcagaacgaagtccgcgcccggtacggccagcagcacgccagtcatcccgcccacgctgaaggtgacgataaaaccgatggtccacagcatcgcagaatggaacacgatgcggccctgatacatggtgaacagccagttgaagatcttcaccccggtcgggatggcgataatcattgtggtgataccaaagaaggcgtttacgttcgcgcccgcacccatcgtaaagaagtggtgcagccaaacgatgaagctcagcacggtgatacagacggttgcccataccaggctggtataaccaaacagacgtttacggctgaaggttgccgcaatttcggagaacacaccgaaaacaggcaggatcaggatgtaaacttccgggtggccccaggcccaaatcaggttgatgtacatcatcatgttgccacccatatcgttggtaaagaaatgggtgcccagatagcgatccagggtcaacaacgcgacggtaaccgtcagaattgggaaggaagcaataatcagtacgttcgcgcacagacttgcccaggtaaatactggcatcttgaacatggtcatgcccggtgcgcgcatcttcagaatggtaacgaagaagttgataccggtaagcgtcgtacctataccggatagctggagactccatatccagtaatcgacaccgactcccggactgtactctattccgcttagcggtggataggccagccagccggtctgcgcaaattcgcccacgccgagagaaacgttaaccagaatcacaccaacaacggtaaaccagaagcttaagttgttgaggaacgggaacgcaacgtcacgcgcgccgatctgcagcggaaccaccaggttcatcagaccgataacgaaaggcatcgccacgaagaagatcataatcacgccgtgcgcggtaaagatctgatcgtagtggtgaggtggcaggaagcccgcttcgcccgcgctggcaagagcctgctggctacgcatcataatggcgtcagcaaaaccacgcagcaacatcacaatcgccacgatgatatacatgataccgaggcgtttatggtcgacggaggtcagccactctttccacaggtaggtccacttaccgaagtaagtgatcaggccaacgagcgccagacctcccaaaataatgccagcgatcgtaaccatgacgataggttcatggaacgggactgcatcaagacttaattttccgaacatctttattcttcctcaacccctttaatgggcggattccgcgtggctcatgtccatgccttccataccttcgtgtgcgctgtgctcaccttctggctgggtcatgtccatgctcttaccgtgagccataaacttgttaattacatcggcaaacaagtctggtttcacgttggagaaatattccacctggttgtattcgctaggcgcggccagtttttcgaacgcagccatgtcagacatggtgttcgggctctgcttcgcttttgcgacccactggtcgaatgcggcgcgatccggtgttgcaatagctttgaacttcatgccactgaagcccgggccgctgtagctggcggagataccgtcataagtgccgggttcgttggcgatcagatgcaggcgagtctgcataccggccatggcataaatctggctacccagacgcggaatgaagaaggagttcatcacggagttggaggtcactttgaagtacaccggagtgttcgccgggaaagcgatttcattcacggtagcaatgccctgttccgggtagatgaagaaccatttccagtccatggaaaccacttcgatggtaatgggcttctcgtcgtgtgccagcggcttgctaggctcaagagcgtgagtggttttccaggtcagtactgcaaggaagatgatgattaagataggtaccgtccagaccacagcttccactttattggagtgactccagttcgggctgtacttagcatctttattgctcgcacggtacttccaggcgaaaccaacagccatcaagattgcgggaataacgacaatcaacatcaggccaaatgccgtcagtatcagactacgttgctccagaccaatctgtcctttgggatctaacagcgcagaattacagccactgagcaatacagtgcctgcaaataaactcaaccatcccaaacttttattgtatttcctgagtctcatttaacgacctcaattccacgggatctggtggcgtttaaagtgtgtgggcattttacgggaaggttacattactgtaaacatgattaaattcctgttacttggatttggctgccaggtcacatatgttgcaaaacatatcaggttgattttaagaagctgttgcaaaagggcgttataacaaaaggggagtgctgaaggagtctgggcgggcaattggtataaccaatgtgaaataaaacaattatttaacaaataattatcattagagtgacaactgggtgatgagaaaataaagactcattagctgaatcgtgtaagaaaaatagaatttataaatggcgccaataatttccaaacgctaagccgcacaaaagaacaaatattaataagcgatactgatgtttatttagccgtaataattacggcgagtgattactacagctaaataatatttacagattacgtcagatgcgtttttcgtagcgccagataatccagcaaaccaccaagcacgacgccagaaagggcgactaaaaccccgacttccagcagagcaggcaggaaagagaagtgcgtcaaatccagcgcgtccatcgtcaatagcagtaaccacacggccaacaggctgacgcccgccgccagtgtccacatggcaaaggcataacctgccggatatgcggtacgggagataaagttgtcatttactcgtgtatattcaagcgtctggcggcaaaccagcagcaaaataagccctggtacggcagcggcgacggagaatagatagaatgtgctccagccgtgtgcttcaacaaaccaacccgccacggggccgacataaactcgccctacagcagaaagcgcactgagcagggcaaattgagtagcggaaaaactcttattacatagcgtcattaacagcgcgacaaaggcacttgtgcccatcccgccacagaggttttcgaaaaagacggctgcgcccatgctgtagagatgcttatcagtaatgctcagcagccagtaaccggcgttagacgcaccttgtaaaatgccgaaaatcagcagtgcccggaacagactcaggcgctgcatcaaaatcccaccgtacaatgcgccaacaatggtcgctagtaagccaagcgttttgttaaccacgcctacttcacccgcatcaaacccgacgccgcgaatcaaaaacgtggttgtcaggctcatggcgaatgcgtcgcccagcttatacagcacgataagaagcaaaataagccaggcattattgcgaccaaagaaatctcgcagaggtgcaacaaccgcttgttccagcgttttgggcacaggaatggtgtcggttggttctggtgcaagcaacgtcgcgataatacaggggatcaacagtgccgccattaaccagtacatgccctgccagcccagccatttatctgccagccacagggctaggccgccggaaaccagcatccctaaacggtaacccagcacgctgattgccgcgcccgcaccacgttcttctgccggaagcacatcggttttccacgcatcgaagactatatcctgggaagcagagcaaaaagcgatcaccactgccagcgccgccatccagcggagttgggtgcctggttcgagaaaacccatcgccgcaatggcgactaataacaggatttgcgtggcgagcagccaaccgcgccgccgcccaaaaaatggaggcgtgtagcggtccatcagcggactccagaggaatttaaaaacgtaagcctggcctaccagagagaagaaaccaatggttttgagatcgatattctcgaccgtcatccaggcctgtaaggtaccggatgtcagggcgagcggtagcccggaagcaaaacccaggatcagcaatatggcactacgcggctgttgaaaaatacgtaaatattgactggacatgggcgtctacaggcccggcttgcaccgggccagagggcagaaattaacgcgcgttctgcttgatgaattcgtggatgctggtgtcctgagacatatcagcgatggtatcggtcagcacactgttaaccgcatcggcgatatttttgttggaggcctggaacgcaccttcaacgttgtagctggcacgatagtttttggtcattttgttgccattctgcgcggtagcgatgatggcgatatccgctttggtcgcgatgttgtagcgcacgttgccctgggacacgtcagcatacagttggctaacgatgatttgcagattaaccgggccattcggaccaaccatgtaaccacgcgcggtcatctgtttttccagcacttcttgcagcaggaaacgcagatcgcgggaggcggtcagggtaacgatttgattatcgcgggtgacttttgccagcgcctgatcggtacgctgatcggcaccattaatgcttacggtgacgcccatcaggcttggatcctgctgtggcagtgtaatcgtcggggaaacttcaatagttgttggcggttttgcgcatcctgcaagcataaacagagcaactaacgggaagaggatttttttgaacatgttcgggctctcagagactcttaagcgtgtttggtaaaaattcccgccatcataacattgccaacggcgaggggaagtgggtaaggcatgtaaattcatcatgttgacgaaataatcgcccctggtaaaagaaacactgatgcgaggcctgtgtttcaatctttaaatcagtaaacttcatacgcttgacggaaaaaccaggacgaaacctaaatatttgttgttaagctgcaatggaaacggtaaaagcggctagtatttaaagggatggatgacatctcagcgttgtcggaggagatatttcatgatgatacgtgagcggatagaagaaaaattaagggcggcgttccaacccgtattcctcgaagtagtggatgaaagctatcgtcacaatgtcccagccggctctgaaagccattttaaagttgtgctggtcagcgatcgttttacgggtgaacgttttctgaatcgtcatcgaatgatttacagtactttagcggaggaactctctactaccgttcatgcgctggctctgcatacttacactattaaggagtgggaagggttgcaggacaccgtctttgcctctcctccctgtcgtggagcaggaagcatcgcgtaaaaacgcatttgcaactgtcggcgcttttccagtatgttgctaaagattttatgaaaaacggcctgcgggccgttttgttttgtctggattttgcgctttttgcccagcattcagacgaaaattgcccgggaattgtgaaaaaatacgcgacagcgcgcaataaccgttctcgactcataaaagtgatgccgctataatgccgcgtcctatttgaatgctttcgggatgattctggtaacagggaatgtgattgattataagaacatcccggttccgcgaagccaacaacctgtgcttgcggggtaagagttgaccgagcactgtgattttttgaggtaacaagatgcaagttagtgttgaaaccactcaaggccttggccgccgtgtaacgattactatcgctgctgacagcatcgagaccgctgttaaaagcgagctggtcaacgttgcgaaaaaagtacgtattgacggcttccgcaaaggcaaagtgccaatgaatatcgttgctcagcgttatggcgcgtctgtacgccaggacgttctgggtgacctgatgagccgtaacttcattgacgccatcattaaagaaaaaatcaatccggctggcgcaccgacttatgttccgggcgaatacaagctgggtgaagacttcacttactctgtagagtttgaagtttatccggaagttgaactgcagggtctggaagcgatcgaagttgaaaaaccgatcgttgaagtgaccgacgctgacgttgacggcatgctggatactctgcgtaaacagcaggcgacctggaaagaaaaagacggcgctgttgaagcagaagaccgcgtaaccatcgacttcaccggttctgtagacggcgaagagttcgaaggcggtaaagcgtctgatttcgtactggcgatgggccagggtcgtatgatcccgggctttgaagacggtatcaaaggccacaaagctggcgaagagttcaccatcgacgtgaccttcccggaagaataccacgcagaaaacctgaaaggtaaagcagcgaaattcgctatcaacctgaagaaagttgaagagcgtgaactgccggaactgactgcagaattcatcaaacgtttcggcgttgaagatggttccgtagaaggtctgcgcgctgaagtgcgtaaaaacatggagcgcgagctgaagagcgccatccgtaaccgcgttaagtctcaggcgatcgaaggtctggtaaaagctaacgacatcgacgtaccggctgcgctgatcgacagcgaaatcgacgttctgcgtcgccaggctgcacagcgtttcggtggcaacgaaaaacaagctctggaactgccgcgcgaactgttcgaagaacaggctaaacgccgcgtagttgttggcctgctgctgggcgaagttatccgcaccaacgagctgaaagctgacgaagagcgcgtgaaaggcctgatcgaagagatggcttctgcgtacgaagatccgaaagaagttatcgagttctacagcaaaaacaaagaactgatggacaacatgcgcaatgttgctctggaagaacaggctgttgaagctgtactggcgaaagcgaaagtgactgaaaaagaaaccactttcaacgagctgatgaaccagcaggcgtaatttacgcagcataacgcgctaaattcgcacaaaggcccgtcaccgccaggtggtgggcttttttttgtcatgaattttgcatggaaccgtgcgaaaagcctctttcggtgttagcgtaacaacaaaagattgttatgcttgaaatatggtgatgccgtacccataacacagggactagctgataatccgtccataaggttacaatcggtacagcaggttttttcaattttatccaggagacggaaatgagttacagcggcgaacgagataactttgcaccccatatggcgctggtgccgatggtcattgaacagaccagtcgcggtgagcgctcttttgatatctattctcgtctacttaaggaacgcgtcatttttctgactggccaggttgaagaccacatggctaacctgattgtggcgcagatgctgttcctggaagcggaaaacccagaaaaagatatctatctgtacattaactccccaggcggggtgatcactgccgggatgtctatctatgacaccatgcagtttatcaagcctgatgtcagcaccatctgtatgggccaggcggccagcatgggcgctttcttgctgaccgcaggggcaaaaggtaaacgtttttgcctgccgaatagccgcgtgatgattcaccaaccgttgggcggctaccagggccaggcgaccgatatcgaaattcatgcccgtgaaattctgaaagttaaagggcgcatgaatgaacttatggcgcttcatacgggtcaaagtttagaacagattgaacgtgataccgagcgcgatcgcttcctttccgcccctgaagcggtggaatacggtctggtcgatagcattctgacccatcgtaattgatgccagaggcgcaactgtgccgctatacttatccagggcggcacaacgctgtaagcggcttgcgcctgagaatggcatttgcgtcgtcgtgtgcggcacaaagaacaaagaagaggttttgacccatgacagataaacgcaaagatggcagtggcaaattgctgtattgctctttttgcggcaaaagccagcatgaagtgcgcaagctgattgccggtccatccgtgtatatctgcgacgaatgtgttgatttatgtaacgacatcattcgcgaagagattaaagaagttgcaccgcatcgtgaacgcagtgcgctaccgacgccgcatgaaattcgcaaccacctggacgattacgttatcggccaggaacaggcgaaaaaagtgctggcggtcgcggtatacaaccattacaaacgtctgcgcaacggcgataccagcaatggcgtcgagttgggcaaaagtaacattctgctgatcggtccgaccggttccggtaaaacgctgctggctgaaacgctggcgcgcctgctggatgttccgttcaccatggccgacgcgactacactgaccgaagccggttatgtgggtgaagacgttgaaaacatcattcagaagctgttgcagaaatgcgactacgatgtccagaaagcacagcgtggtattgtctacatcgatgaaatcgacaagatttctcgtaagagtgacaacccgtccattacccgagacgtttccggtgaaggcgtacagcaggcactgttgaaactgatcgaaggtacggtagctgctgttccaccgcaaggtgggcgtaaacatccgcagcaggaattcttgcaggttgatacctctaagatcctgtttatttgtggcggtgcgtttgccggtctggataaagtgatttcccaccgtgtagaaaccggctccggcattggttttggcgcgacggtaaaagcgaagtccgacaaagcaagcgaaggcgagctgctggcgcaggttgaaccggaagatctgatcaagtttggtcttatccctgagtttattggtcgtctgccggttgtcgcaacgttgaatgaactgagcgaagaagctctgattcagatcctcaaagagccgaaaaacgccctgaccaagcagtatcaggcgctgtttaatctggaaggcgtggatctggaattccgtgacgaggcgctggatgctatcgctaagaaagcgatggcgcgtaaaaccggtgcccgtggcctgcgttccatcgtagaagccgcactgctcgataccatgtacgatctgccgtccatggaagacgtcgaaaaagtggttatcgacgagagcgtaattgatggtcaaagcaaaccgttgctgatttatggcaagccggaagcgcaacaggcatctggtgaataattaaccattcccatacaattagttaaccaaaaaggggggattttatctcccctttaatttttcctctattctcggcgttgaatgtgggggaaacatccccatatactgacgtacatgttaatagatggcgtgaagcacagtcgtgtcatctgattacctggcggaaattaaactaagagagagctctatgaatcctgagcgttctgaacgcattgaaatccccgtattgccgctgcgcgatgtggtggtttatccgcacatggtcatccccttatttgtcgggcgggaaaaatctatccgttgtctggaagcggcgatggaccatgataaaaaaattatgctggtcgcgcagaaagaagctagtacggatgagccgggtgtaaacgatcttttcaccgtcgggaccgtggcctctatattgcagatgctgaaactgcctgacggcaccgtcaaagtgctggtcgaggggttacagcgcgcgcgtatttctgcgctctctgacaatggcgaacacttttctgcgaaggcggagtatctggagagcccgaccattgatgagcgggaacaggaagtgctggtgcgtactgcaatcagccagttcgaaggctacatcaagctgaacaaaaaaatcccaccagaagtgctgacgagcctgaatagcatcgacgatccggcgcgtctggcggataccattgctgcacatatgccgctgaaactggctgacaaacagtctgttctggagatgtccgacgttaacgaacgtctggaatatctgatggcaatgatggaaagcgaaatcgatctgctgcaggttgagaaacgcattcgcaaccgcgttaaaaagcagatggagaaatcccagcgtgagtactatctgaacgagcaaatgaaagctattcagaaagaactcggtgaaatggacgacgcgccggacgaaaacgaagccctgaagcgcaaaatcgacgcggcgaagatgccgaaagaggcaaaagagaaagcggaagcagagttgcagaagctgaaaatgatgtctccgatgagcgcagaagcgaccgtagtgcgtggttatatcgactggatggtacaggtgccgtggaatgcgcgtagcaaggtcaaaaaagacctgcgtcaggcgcaggaaatccttgataccgaccattatggtctggagcgcgtgaaagatcgaatccttgagtatcttgcggttcaaagccgtgtcaacaaaatcaagggaccgatcctctgcctggtagggccgccgggggtaggtaaaacctctcttggtcagtccattgccaaagccaccgggcgtaaatatgtccgtatggcgctgggcggcgtgcgtgatgaagcggaaatccgtggtcaccgccgtacttacatcggttctatgccgggtaaactgatccagaaaatggcgaaagtgggcgtgaaaaacccgctgttcctgctcgatgagatcgacaaaatgtcttctgacatgcgtggcgatccggcctctgcactgcttgaagtgctggatccagagcagaacgtagcgttcagcgaccactacctggaagtggattacgatctcagcgacgtgatgtttgtcgcgacgagcaactccatgaacattccggcaccgctgctggatcgtatggaagtgattcgcctctccggttataccgaagatgaaaaactgaacatcgccaaacgtcacctgctgccgaagcagattgaacgtaatgcactgaaaaaaggtgagctgaccgtcgacgatagcgccattatcggcattattcgttactacacccgtgaggcgggcgtgcgtggtctggagcgtgaaatctccaaactgtgtcgcaaagcggttaagcagttactgctcgataagagtttaaaacatatcgaaattaacggcgataacctgcatgactatctcggtgttcagcgtttcgactatggtcgcgcggataacgaaaaccgtgtcggtcaggtaaccggtctggcgtggacggaagtgggcggtgacttgctgaccattgaaaccgcatgtgttccgggtaaaggcaaactgacctataccggtagcctcggcgaagtgatgcaggagtccattcaggcggcgttaacggtggttcgtgcgcgtgcggaaaaactggggatcaaccctgatttttacgaaaaacgtgacatccacgtccacgtaccggaaggtgcgacgccgaaagatggtccgagtgccggtattgctatgtgcaccgcgctggtttcttgcctgaccggtaacccggttcgtgccgatgtggcaatgaccggtgagatcactctgcgtggtcaggtactgccgatcggtggtttgaaagaaaaactcctggcagcgcatcgcggcgggattaaaacagtgctaattccgttcgaaaataaacgcgatctggaagagattcctgacaacgtaattgccgatctggacattcatcctgtgaagcgcattgaggaagttctgactctggcgctgcaaaatgaaccgtctggtatgcaggttgtgactgcaaaataatgacctcgcgcaaaatgcactaataaaaacagggctggcaggctaattcgggcttgccagcctttttttgtctcgctaagttagatggcggatcgggcttgcccttattaaggggtgttgtaaggggatggctggcctgatataactgctgcgcgttcgtaccttgaaggattcaagtgcgatataaattataaagaggaagagaagagtgaataaatctcaattgatcgacaagattgctgcaggggctgatatctctaaagctgcggctggccgtgcgttagatgctattattgcttccgtaactgaatctctgaaagaaggggatgatgtagcactggtaggttttggtacttttgccgttaaagagcgtgctgcccgtactggccgcaacccgcagaccggtaaagagatcaccatcgctgctgctaaagtaccgagcttccgtgcaggtaaagcactgaaagacgcggtaaactaagcgttgtccccagtggggatgtgacgaagttcaagggcgcatctactgatgtgccttttttatttgtattcggtgactttctgcgtcttgtgggctgacaattgcccccgtttcttgtcacaataggcctttgcgcgcatcgatacgttgcgtgaggtacacagtcatctacagcggagtgttgttacaccatgatggacagcttacgcacggctgcaaacagtctcgtgctcaagattattttcggtatcattatcgtgagcttcatattgaccggcgtgagtggttacctgattggcggaggcaataactacgccgcaaaagtgaatgaccaggaaatcagccgtgggcaattcgagaacgccttcaacagcgagcgtaatcgcatgcagcaacagctgggcgatcaatactccgagctggcagcgaacgaaggctatatgaaaaccctgcgtcaacaggtgctgaatcgtctgatcgacgaggcgctgctggatcagtacgcacgtgagctgaaactgggtatcagcgatgagcaggttaaacaggcgattttcgcgaccccagccttccaggttgacggcaaatttgataacagccgctataacggtatcctcaaccagatggggatgaccgccgatcagtacgcccaggcgctgcgtaaccagctcactacccaacagctgattaacggcgttgccggtaccgattttatgctgaaaggtgaaaccgacgagctggcggcactggtcgcgcaacaacgcgtggtgcgtgaggcgactatcgatgttaacgcgctggcggcgaagcagcctgtgaccgaacaggagattgccagctactacgaacaaaacaaaaacaatttcatgacgccggaacaattccgcgtgagttacatcaagctggatgccgcaacgatgcagcaaccggttagcgatgcggatatccagagctactacgaccagcatcaggatcaattcacccagccgcagcgtacccgctacagcatcatccagaccaaaactgaagatgaagcgaaagcggtacttgatgagctgaataaaggcggtgattttgctgcattagccaaagaaaaatctgccgatattatctctgctcgtaacggcggcgatatgggttggttagaagatgccactatcccggacgaactgaaaaatgctggtctgaaagaaaaaggccaactgtctggtgtcatcaaatctagcgtcggtttcctgattgtacgtctggacgacattcagccagcgaaagtgaaaagcttagacgaagtacgtgacgacattgcggcgaaagtgaaacacgaaaaagccctcgatgcgtactacgcgctgcagcagaaagtgagcgatgcggcaagcaacgacaccgagtctctggccggtgcagagcaagctgccggcgttaaagccactcagacgggttggttcagcaaagataacctgccggaagagttgaacttcaagccggttgccgacgctatctttaacggcggtctggtaggtgaaaacggcgcgccgggcatcaactctgacatcatcaccgtagacggcgaccgcgcattcgtgctgcgcatcagcgagcacaaaccggaagcggtgaaaccgttggcagatgttcaggaacaagttaaggcattggttcagcacaacaaagctgaacaacaggcgaaagtggatgctgagaaactgctggttgatttgaaagccggcaaaggtgcggaagctatgcaggctgccggtctgaaatttggcgagccgaaaaccttaagccgttccggtcgtgacccgattagccaggcggcgtttgcactgccactgccagcgaaagacaaaccgagctacggtatggcgaccgatatgcaaggtaatgtggttctgctggcgctggatgaagtgaaacaaggtagtatgccggaagatcagaaaaaagcgatggtgcagggtatcacccagaacaacgcacaaatcgtctttgaagctctgatgagtaacctgcgtaaagaggcgaaaatcaaaattggcgatgcgctggaacagcaataatcctgaagccgcctcgcaaaaaaatgcgttgcagctgtaacaagaaaaggtcgctttcgcggccttttccatttctgaacattgccatttgtttactgttttcactgccgttaaggtgattccactgttaacaaacaaggagaaaacagtatgaaacacggaattaaagcactgctcattaccctgtccctggcctgtgccggaatgtctcatagcgcgctggcggcagcttctgtggcgaaaccgacggcggtagaaaccaaagcggaagctcctgcagcacaaagtaaagcagcagtaccggcgaaagccagtgacgaagaaggcacccgggtcagcattaataatgccagcgcggaagagctagcccgcgcgatgaatggcgttggcctgaagaaagcgcaggcgattgtcagttatcgcgaagagtacggtccgtttaaaactgtggaggatctaaagcaggtgccggggatgggcaatagcctggtggaacgtaatctggcggtattaaccctgtaattaatttgcatagtggcaattttttgccagactgaagaggtcataccagttatgacctctgtacttataacaacaacgtaaggttattgcgctatgcaaacacaaatcaaagttcgtggatatcatctcgacgtttaccagcacgtcaacaacgcccgctaccttgaatttctcgaagaagcccgctgggatgggttggaaaatagcgacagttttcagtggatgacggcccataacatcgccttcgtcgtggtcaatatcaatattaactatcgtcgcccagcggtattaagtgacctgttaactattaccagtcagttgcagcaattaaacggtaaaagcggcatcttaagccaggtcattacactggagccggaagggcaggtggtagcggatgcgcttattacgtttgtttgtattgatcttaaaacgcagaaagcattagctctggaaggggaattgcgcgaaaagctggagcagatggttaagtaaacgttttgtggtgccggatgctcaagccgcatccggcgacacccggaataattacctcaacccggttttctgcttcatcgctgccatcaccgtcggtttatcggccagataatgattcaaaccgttggcgcgtaaattacatgccgcacaatgaccgcaaccgtcgcctttaaagccgttatagcaggtcaacgtttcgttacggactaaatccagtttgccgtaataatctgccagcgcccaggtttccgctttatcaatccacatcagcggcgtttcaaaacgaatatctttcgccatgcccaaactgacggcatggtttagtgctttcacaaactcatcgcggcaatccgggtagccggagaaatccgtttcgcagacgccagtaattacggcttctgcttttacctgatacgcatatattgccgccagcgtcaggaacaaaatattacgccctgggacaaacgtattcgggataccatcggcttcaggttcataatcaggcaccggaatgctgtcacgcgtcaggctactgaccgccagctcgttgagcagggtgacatccagcaccttatgcgcgcgtgcccccagtttcagcgccagttcgcgtgccacgtcgatttctgcgcgatgccgctgaccgtaatcgaacgtcacgcaatggacttcatcatattgttgtaatgcctgcaccagacaggtggtggaatcctgacctccactgaacacaacgacagcacgtttcatagataatcctgcttgaacaataaaagcgttatggtaacgcctgcgattaacccggaccagctattcattggcttggcgcgggaagccaggcttcggtaaattcaaaccagccgcgcggtgtcagtcgcacaccgttcacgccgggaggggcactaatgcgatagtgatagttgaacagcggcgtcagcgtcgcatctgtcattaactggctaaaaaccgctttcagggcattaaatcggttttcttcatcaggcattatttgcacggcatccagtgtgctttgtagatgtgcgtatgctggagcgtcgaaaacatgtggccacagcggatcgcagcgcagccattgctccagagtatattccggtgcttcgccaattaatctgtcgcccatcatgaggtctgcgtgtgcctgtagggtcgtgtcgtcccagttttttgcgttatgaaaaataattgtgagttcacagccttccgctgccagtgtcgcctgtaggcgttctgccatggtatgaagttctatcggtaggtgataaaccagcgtcaaggttttcggtagtttgacttcatccggtacctgccaatgcggaatagtccagcctggcagtaatgcatgactggcggtgatcaggttttctccgacttctaacgtttgtaataaaccggattgatgaataatggagatcacttttcgcgcctgccagagggagagtcggggacttttgcgcaacgtcaaatagcaaaaacctaaactgatgccgctactgacctggctgacccgttgcagctcctccggtttgccgatggtgatttgcacgggatgccgacaactggttcccaaatctttttcgaaaagcggcggagttatccagtactcaaccgctttaagcagcggatgacgtaaatggtaataatcatggctttccaggcgcaccagctctgctgtgaattgtgttaagcgaaaaggacccgtgccgatcagtgggaattgcggatgcgccagatggctgcaatagctcgccagccggtgcgcaagccagtaatcagggcgatgtaaaaagaaggtcagacactgcggatgggtgacttcaatacgcttcacgctaataaataattgatccagtgctggcagttgtaacagcatcaataatcgctggtgtaagtgactggcttttactgcatcgccgttatgccagtgtagggtactacgaagataaaagtcccagcgtaacccgtcagtagaggtttcccagtgatgcgctaaatcgccaatcgggcgctgagtattattatcgaagcgggtcaggccggaaaatatctgcccggcgagatgctgctcggcacggccgggcaaaaagcctggttgtagcggttcgagcgggcgatagtagggaatacgcaacgtgggtgtatcgttttgccattgtccgcccataaacggctgtaacagagtgcgcagctcacctggggccagttgcgccagctccagcacatcttgctgctttccggtttccagtgcctgttccatcatcgcattgcgtaggctttccggcgtgaccagaaagcgtaattgtccgcgctttccgcgtccactctgcgcctgccactccagccatcccgcctcctgtgcctgacgcaacagcgtacgaacatggcgttcgctgcaaaaacagcgttcggccagttcgctgacggtgacggtttgcggctttccggcggaaggttgccacagacgttgatactggttaagacggttgagcaatcgcatataaacccggaacaatattatttaactattcactattacttccgtatatatcaggtgatactcaatcaccattaaccgtgtcacagagtggagaaagaaatggctcgtctggcagcatttgatatggatggcactttattgatgcccgaccatcatttaggtgagaaaaccctctctactttggcgcgactgcgtgaacgcgacattaccctcacttttgccacggggcgtcatgcgctggagatgcagcatattctcggggcgctaagcctggatgcgtatttgattaccggcaacggaacgcgcgtgcattctctggaaggtgaacttttacatcgtgatgatttacctgcggatgtcgcggagctggtgctgtatcagcaatgggatacccgagccagcatgcatatcttcaatgacgacggttggtttaccgggaaagagatccctgcgttgttgcaggcatttgtctatagcggttttcgttatcagataatcgatgtcaaaaaaatgccactcggcagcgtcaccaagatctgcttctgtggcgatcacgacgatcttacacgcttgcagatccagctatacgaagcattaggcgagcgtgcacatttgtgtttttccgccacggattgcctcgaagtgctgccggtgggctgcaataaaggcgctgcattgacggtgctgacccaacatttaggtttaagcttgcgcgattgcatggcctttggtgatgcgatgaacgatcgcgaaatgttagtcagcgtcggtagcggatttattatgggcaatgcgatgccgcaactgcgcgcggagctcccgcatttaccggtgattggacattgccgaaatcaggctgtctctcactatttgacgcactggctggactatccacatctaccttattcccccgaataacgagatcccttccagcaccgggcaattgcccggttttttttgcgttgaatttgtcattttgtgccgtggtgtttaaaccgcacagaataaattgtcgtgatttcacctttaaaataaaattaaaagagaaaaaaattctctgtggaagggctatgttagataaaattgaccgtaagctgctggccttactgcagcaggattgcaccctctctttgcaggcactggctgaagccgttaatctgacaaccaccccttgctggaagcgcctgaaacggctggaggacgacggtatccttatcggcaaagtcgccctgctggatccggaaaaaataggcctcggcctgaccgcttttgtgctgataaaaacgcaacatcacagcagcgaatggtattgccgctttgtcacggtggttaccgaaatgccagaagtgctggggttctggcgcatggctggtgaatacgattatctgatgcgcgtccaggttgccgacatgaaacgctacgacgagttttataagcgtctggtaaacagcgtgccggggctgagcgacgtcacttccagcttcgcgatggaacagattaaatacaccacttctttacccatcgaataaatatccagaatcaggtcaggacacaacgcgtgcgattatttgctcaattaagctggtatttccgtcgggaatggcgtcgctatctcggggctgtcgccttgcttgtcattatcgcgatgctgcaactggttccgccaaaagtggttggtattgttgtcgatggcgtgacagaacaacactttactaccgggcagatcctgatgtggatcgccaccatggtgctgattgccgttgtggtttatctcctgcgttacgtctggcgggtattgctgtttggtgcgtcttatcaactggctgttgaactgcgtgaagattattaccgtcagctaagccggcagcatcctgagttttacctgcgtcatcgcaccggtgacctcatggctcgtgcgaccaatgacgtcgatcgcgtcgtgtttgccgccggagaaggggtgctgacgctggtggatagtctggtgatgggctgcgctgtgttgattatgatgtctacgcaaattagctggcagttgaccttattttccctgttgccgatgccagtgatggcgatcatgattaagcgcaacggcgatgctttgcatgaacgctttaagctggcacaggcggcgttttccagtcttaatgaccgcacccaggaaagcctcaccagtatccgcatgatcaaagcctttggtctggaagatcgccagagcgcgttatttgccgcggatgccgaagataccggcaaaaaaaacatgcgggtggcgcgtattgatgctcgtttcgacccgaccatctatatcgcgattggtatggcgaacttgctggcgattggcggcggtagttggatggtggtgcagggcagtttaacgctgggccagctcaccagttttatgatgtatttaggtctgatgatttggccaatgctggcgctggcatggatgtttaacattgtggaacgtggtagtgctgcgtacagccgtattcgcgcgatgctggcggaagcgccggtggtgaacgatggtagcgaacccgtgccggaagggcgtggcgaactggatgtaaatattcaccagttcacgtatccgcagactgaccatcctgcgctggaaaacgtcaatttcgccctgaaacccggtcagatgctgggtatctgcgggccgactggttccggcaaaagtaccctgttgagcctcattcagcgtcatttcgacgtcagcgagggggatattcgctttcatgatattcctctgacgaagttacaactcgatagctggcgtagccgcctggcggtagttagccagacgccattccttttttctgacactgtggcgaataacatcgcgctgggttgcccgaatgccacccagcaagagattgagcatgtcgcgcggttagccagcgtacatgacgatattttgcgtctaccgcaaggttacgatacagaggtgggcgagcgcggtgtgatgctttccggcgggcaaaaacagcgtatctccattgctcgtgcgttattagtcaacgcggaaatcctcatccttgatgatgcgcttagcgcggtggacggacgcactgagcaccagatcctgcataacctgcgtcagtgggggcagggaagaacggtaatcatcagtgcccatcgcctttctgcactgacggaagccagtgaaattattgtgatgcagcacggacatatcgcccagcgtggcaatcatgatgtgctggcacaacaaagcggctggtatcgcgatatgtatcgctatcaacaactggaggcggcgctcgacgacgctccggaaaatcgcgaggaggccgtcgatgcgtaactaaaaatcgcgaggaggccgtcgatgcgtagttttagccaactgtggccgactctcaagcgcctgttagcgtacggtagcccgtggcgtaaaccgctggggattgcggtcctgatgatgtgggttgcggcggcggcagaagtcagtgggccgctgcttatcagctattttatcgacaatatggtagcgaaaaataacctgccgttgaaagtggttgcagggctggctgcggcgtatgttgggctgcaactgtttgccgccgggctacattacgcgcagagcctgctgtttaatcgggcggcagtaggcgtagtgcaacagttgcgtaccgacgtgatggatgctgcgttacgccagccattaagcgagtttgatacccaacccgtcgggcaggtgatttcccgcgtcactaatgacactgaagtgatccgcgatctctacgttaccgtagtggcaactgtcctgcgcagtgccgcgctggtgggcgcgatgctggtggcgatgttcagcctcgactggcgaatggcactggtggcgataatgattttcccggtggtgctggtggtaatggtgatataccagcgttacagcacgccgattgtccgtcgtgtgcgcgcctatttggcggatatcaacgacggctttaacgaaatcatcaatggcatgagcgttatccagcagtttcgtcagcaggcgcgatttggcgaacgtatgggggaggccagtcgtagtcactatatggcgaggatgcaaaccctgcgcctcgacggttttctgctgcgtccgctgctgagtctgtttagtagcctcattctttgtggcttgttgatgctgtttggcttctccgccagcggcaccattgaagtgggcgtgctgtatgcgtttatcagctatcttgggcgacttaacgaaccattaatcgaactgaccacgcaacaggcgatgctgcaacaggctgttgttgctggtgagcgcgtgtttgaactgatggacggaccgcgccagcaatatggcaatgatgatcgcccgttacagagtggcaccatcgaagtcgataacgtgagttttgcttatcgcgatgacaatctggtgctaaagaacattaatctctctgtgcctagccgcaattttgtggcgctggtcgggcataccggcagtggcaaaagcaccctcgccagtttattgatgggctattacccgctaacggaaggtgagattcgccttgatggtcgtccattaagtagcctaagtcacagcgcgctgcgccagggcgtggcaatggtgcagcaagatccggtggtgctggcggataccttcctcgccaacgtgacgctggggcgggatatctccgaagaacgcgtctggcaggcgctggaaaccgtgcaactggcggagctggcgcgtagcatgagcgacggtatttacacgccgctgggcgagcaggggaataatctcagtgttgggcaaaagcaactgctggcactggcgcgcgtgctggtcgagacgccgcaaatcctgatccttgatgaggcaaccgccagcattgactccggtactgaacaggcgattcaacatgctctggcggcggtgcgtgaacataccacgctggtagtgattgctcaccgcttaagcaccattgttgatgccgacaccattctggtgcttcatcgtgggcaagccgtggagcagggcactcaccagcaactgctggcggcccagggacgctactggcagatgtatcaactgcaacttgcgggcgaagagctggcagccagcgtgcgtgaagaggaaagtttgagcgcctgaatagcgcaatatttcatcgttggtgcaaaaatgtaacgcactgtgcactgtcatagtgcgttttcattttcaaacttcttaacttcctgctctctttctcgtttttcatttctggcacaccgcttgcaataccttcttcgtgtagcagaaccattaccgaattctgaccggaggggatctatgaagctggtgaccgtgataatcaaaccattcaagctggaagacgttcgtgaagcgttatcttccattggtattcagggcctgaccgtcaccgaagtgaaaggtttcgggcgtcagaaagggcatgccgagctgtaccggggggcggaatacagcgtcaatttcctgccaaaagtaaaaattgatgtggcgattgctgatgaccaactcgatgaagtgatcgatatcgtcagtaaggcggcttacaccggaaaaattggcgacggcaaaatcttcgtcgctgaattgcaacgcgtcattcgtattcgtaccggcgaagccgacgaagcggcgctgtaatctctggcacacagcaacaggaacgaaaaatgaagatagcgacgataaaaactgggcttgctagtctggcgatgcttccgggactggtaatggctgcacctgcggtggccgataaagccgacaatgcgtttatgatgatttgtactgcgctggtgctgtttatgactattccggggattgccctgttttacggtgggttgattcgcggcaaaaacgtgctgagcatgctgacgcaggtgacggtgacatttgcactggtctgtattctctgggtggtttacggttacagcctggcgtttggtgagggcaacaacttcttcggcaacattaactggttgatgctgaaaaacatcgaactgacggcggtgatgggcagcatttatcagtatatccacgtggcgtttcagggaagctttgcctgcattaccgtcggcttgatagttggggcgctggcggaacgaatccgcttcagtgctgtgttgattttcgtggtggtatggctgacgctctcttacattccgattgcgcatatggtgtggggcggtggtttgctggcttctcacggtgcgctggatttcgcgggtggcaccgtggtgcacattaacgccgcaatcgccggtctggtgggcgcgtatctgataggaaaacgcgtgggcttcggtaaagaggcgtttaaaccgcacaacctgccgatggtcttcaccgggactgccattctctatatcggttggtttggctttaacgccgggagtgcgggcacggcgaatgaaatcgcggcactggcatttgtgaatactgtggtcgcaacggcggcggcaattcttggctggatcttcggtgaatgggcgctgcgtggtaagcctagtctgctgggggcgtgttctggcgcgattgccggtctggtcggcgtgacgccagcctgcggctacattggggttggcggcgcgttgattatcggcgtggtagctggtctggcgggcttgtggggcgttaccatgctcaaacgcttgctgcgggtggatgatccctgcgatgtcttcggtgtgcacggcgtttgtggcattgtcggctgtatcatgaccgggatttttgccgccagcagcctgggcggcgtgggcttcgctgaaggtgtgacgatgggccatcagttgctggtacagctggaaagcatcgccattacgatcgtctggtccggtgttgtggcatttatcggctacaaattggcggatctgacggttggtctgcgtgtaccggaagagcaggagcgagaagggctggatgtcaacagccacggcgagaatgcctataacgcgtaacaagcactgcaaaaaacagccggacggttttcacctccggctatttttttaattgtgattacgcatcaccccttcctgaacggtgctggcaaccagtacgccgtcttgggtataaaactcaccgcgcacaaagccacgtgcgctggacgcgctggtgctctccacgctatacagcagccattcattcaaattaaacgggcgatggaaccacatggaatggtcaatggtggcaatctgaatccccggttcgagaaaaccgatgccgtgcggctgtagagctaccggcaggaagttaagatcagaagcgtaaccgagcagatactgatgaacgcgcaggtcatccggcacgctaccatttgcgcggatccacacctgacgatgtggttctgcgacgtgacctttcagtgggttatgaaactccaccggacggacttccagcggacgatcgcagatgaatttatctttcagcactggcggcagcaggtgcgccaggctttgggcgatttgcgtttcgctagggaggccatcaggcgctggcgcggacggcattgttttttgatgttcgaaacccgcttctggtgcctggaaagaggcagtcatataaaaaatcggtttgccgttttgaatagcagcaacccggcgggcgctgaagctgttaccgtcacgcagcgtttcgacatcataaataatcggcttcttactatcgccagggcgaagaaagtagctgtgaaagctatgtaccagccgctcttcagggacggtctcttttgcagcatacaaggcctgacccacgacctggccgccaaacacctggcgtaaacctaaatcttcactctggccgcgaaagagtccttcctcaattttttccagatttaacaatgtcagtaaattttttagcgcctgactcatataactctccagtaacaaagctgccgcagcaagccaaagtgagttgagtataacgcaaatttgctactggtccgatgggtgcaatggtctgaattacgggctaattacaggcagaaatgcgtgatgtgtgccacacttgttgacgttactattttgttaaccactcttccggcgaggaaagttagcccgctggtgcattgataataaggagaaatgaatgaaactcgtgcacatggccagtggtttagcggttgcgattgcgttggcggcttgcgcagataaaagcgcggatattcagacgccagcaccggctgcaaatacgtctattagtgcaacacaacaaccagctatccagcaaccgaatgtctccggtaccgtctggatccgtcagaaagtcgcactgccgcctgatgctgtgctgaccgtgacactttctgacgcgagcttagccgatgcaccgagtaaagtgctggcgcagaaagcggtgcgtactgaaggtaaacagagtccattcagctttgttctgagttttaacccggcagatgttcagccgaacgcgcgtattctgttgagtgcggcgattaccgtgaatgacaaactggtatttatcaccgataccgttcagccggtgatcaaccagggcggaactaaagccgacctgacattggtgccggtacagcaaaccgccgtgccggttcaggccagcggtggcgcaacgactaccgtacctagcactagtccaactcaggtgaatccgtctagcgcagttccagctcctacgcaatattaagcgacgttaaccctctccgcccggagagggttagtagttccagcgataacgctgcaagtcgatttgcccgcttccgcttaccatcacaccttctgccagtaatgcctgtcgctgacgctgtaaatccggtccggttaggctaattgtgccgtggcgattaaccacccggtgccagggtaaggtgctgccttcagggagacgctttaacacaccgcccacctggcgcgcggcgcgggggcttcccgccagtttcgccacatcaccgtaagtggtgacatagccttcgggaatagcggcgacgatttgccagacgcgttggggaaaactatcttctttttccatcttttcttcctgaggtaatttttcagcataatctggaaaaacgccgctgtgaagtcgcattgcgcaagaaaccagcatctggcacgcgatgggttgcaattagccggggcagcagtgataatgcgcctgcgcgttggttctcaacgctctcaatgggggctctgttggttctcccgcaacgctactctgtttaccaggtcaggtccggaaggaagcagccaaggcagatgacgcgtgtgccgggatgtagctggcagggcccccacccatttctgcctcccaccgtttcgtcaaaaaatcccaacatggctaaactttaaccacaactgacgtcgcaagaattgtctggctgcgcagtacgcttcggaggtatgtctgatgaagtatgttgatggttttgtggttgccgttcctgccgataaaaaggatgcctatcgggaaatggccgctaaggctgcgccattgtttaaagagtttggcgcgcttcgtattgtcgaatgctgggccagcgatgtaccggatggcaaagtgaccgattttcgtatggcggtgaaagcggaagagaatgaagaggttgtctttagctggattgaataccctagtaaagaggtccgcgacgctgctaatcaaaagatgatgagcgacccacggatgaaagagttcggcgagtccatgccgtttgacggcaagcgaatgatctatggcggattcgagagtatcatcgacgaataagtagcgtgacgggctgtgcggcgtgccgtcagcccaaaaattcacaaatgttgctcggcccagcgtaagaaatcttctttcggtaatgccttgctgtagagccagccctgaccgtagtgcacgccatgctggcgtaaccactcttcttgtttactggtttcgattccctccgctaccattttcagtttcagtgtttttgccatttcgatgatatgcggcgtgacatttttatattccagcgcatcaacgaaagatttatcgatcttcagaatgtcgacatccagatcctgtaaataacttaaactactataccccgtaccaaaatcatcaagataaatttcatggcccgcctcccggtagcgagaaattatcggggcgctggttttcggatcggcaaactcgcgttcagtgagttcaagcgcgatctgtctgggattaacctgatagtgattgatcatgtcacgcagcaattgcgggattttttcgctggtgagcacgggggattcaagattgatgctaatatgctgctgtggatgctgacgcagccagtcgcccatatcttcaaagacgcttcttataatcagtagcgtcaatggctcagaaaggcccgtttgctgtgccagcggaataaaactatctggactcaaccaactaccgtctgtctgcggccagcgcgccagtgcctcagcaccgacaattttgccattggctaaggagacaatcggctgatagtgcacgcaaatatcacgattttcgatagcatcctgcagccgatgatgcggactctgaatacggcgcaaaatacgcagcacaaacatcgctgccagcaggccaatcaccaacccgagcggtaaccaaataaagacttgccgatgccagcctttctgcaacattttcgtactagcccatgtgatgatgctaatattcatctccggtaagggcaggatatcgtaaatgattccattattttcgatatgctcaccgggtgttttttgtagcctggtaataattccctgagcaatttcatcgctgctggttatgacaacgttatgggcattgccaataatggcggcatcaatttgccaactgctatagggaatgacatcaataaaggaagcggggtcgatcatgacgacataatgtgccgttcccatggcgaccatgtaacggataatgcctaaatcgttatggcttgttaaccagacacgataaccatctttgctaattttacctggctcggggaaggtatcgggcggactttcatgctccagagagctacactggggaacgttgttatcgatataagccacttcctgaatatagcgataactgtaagatacccgacgcatttccatgagatgggcttcgctacaggcagcgccttgccatctttccagctcctgcagcgcatctttcccttgtgtcgccaccttattggctcgaatagcgacgcgggaggaataggtatccagctcttcaataaagcttgtttctacctgctgatgggccagccagatgcttaagccgacaggcagcaatacactaagaatcagtactccgctaataaggccgaccagatgtcgtgttctcaccagcatatccttattaacacagtgtagggaaagtatatctgattgtggaaaaaggctggctggagataaggaggtagagctggtatttcatgaagtgatgggtggaaacgatcattgtcatttgaccaggcgcagagctttacgcctggtatgtaaccctaacttaagatgtactttcggcgcgagcgagggtaaaaatatcgtaaaaagacagttcacctttacggacgatcattttttgcagttgttccttatgaacatccgcgacacgcggagagttcaagatggcttcaaccagcgcggcaggtacaaagcgcgtgttgtaccattcgccgttatagcaaacgcggaaatccagcacgtcgatatcttcatagcggtagcgtgggtagacatcgaaaaagaagaaaccattaagcaggataaataatacaaccagtagccagacagagccactcagcgtttcggactgcaacatcaccgccagggtggcaaaaaaagcaacgtacataccgataaacagccccggatgtttacggataaaactgatactaaagcggggtttgttgtcgcgtttttcgcgggtattcagagactcaatcgtttcggtcagcaggcgttgtatttcggtcatcgtttgccttcgtggtatctgcaactttccagggaacaccctattttaacgtgggaatagtagaggggaagtaacagatctaccacaattttgcataacagttgcgaaaaaccgattacaattttttaattattctggctggattaccgcccacgacaacgttgtccgggacatcttttgtgacaactgcaccactggctaccacgacgttatcaccaatggtcacaccagggttaatgaccgcgcgtccgccaatccagacgttattaccgatggtgacgggtttccccagttcagcaccgctattacgtgctacagggtcgatgggatgtgttgccgtgtagatatgaacgcctggtgccaacatacagttatcaccgatgcgaatagggcagacatcaagcatcacgcaatcgaagttggcgaaaaaattattaccgagaaaaatgttatagccatagtcacagcgaaacgttggctcaatataagcctctgtcacctgaccgaatagatcagcgagaatttgctggcgtaatgtgtgctcttccgccagggaatgattgtatcggtgaataagctgacgagcgcgcaggcgatcgcgagataacgtctcatctgcgctgcgatacaactcaccagcaatcatcttttctttttctgtgctcattactgacctccggttgctgaaaatgcggcaacacagtaagacgaaaagtcagtgaagagaacgttcccattacatctgtgtgataaagatcacatagggtatgtcttcatggcgaaaaagtataaaattcttaataaacagccggttatagctccgaaagcgaattatttattagcgaataaatttccatacactggaagggatcttgtcgtacagtttattcatggtcaattcggcgaggcggtgatctgcggcactgtaaaataccgccagttcattatcacttaattcgtatttatttttctcgataacacgctccagcgtgtcaattgtctggcaacgacgtaaacgcattaaataatcggttttcgttaaaggtttttcggacatacttctacctatggttgtaataattttaacaagataaactcgcaggattctctttcgtcgcattgacaaaacaacggaatagtcgattaccactcttccgccatttctgaagatcctgcatattaataccataactactgaacaacataaaggtgtcatccagatattcgtcgatctgctcaatgagcttattgtcttcattatacttaattttgtaattaagtgcgaaggtcgcaatatgctcaatcagttcattcaactggaggttgatcgcgctggttgggtcgtttacccagccatgattgctttcttcaaggtttgcaaggcagtcatgatacagggtttcacagagaaacttaagctgtgcgatatcatgtcttttgggactgtattcatccataacgcgtccccttcttagcggttgaactaacggacacctttcgggatggaaaaaacttactgacctggacttgccctctcgtttgttagcttaactataagccactctttgcaggttttcatcgcattattacgaaaaattacaattaggaaggaagcgggacaggactcactttttcatactagcactaacccgcagcaggtaaaagcagtttgctcgaactattcataacatttcaggattatcgccagatgaaattggtgacactaataccaggattgctctgaatatgacgtaataaccgaggaatgaataaagaattaccgcaaataattaagaatagcctctaaatgattatggattattaaatctattagcgctacttaatataaattaactaacaatcagtattttttatgaattttatccgtggttaatactggttttcgtatgagatcctgagttggtggttcaattactccttaatgttcgtaggttatgcataaaaaaggccgcttacgcggccttagtgattacacgttgtatcaatgatgatcgacagtatggctgtgctcgatatcttcattcttgcggctaaagcggcggcgaaccaccacaaagaataccggaacgaagaagattgccagtaccgttgcggtcaccatcccgcccattacaccggtacctactgcgttctgcgcgccggaaccagcaccagtactgataaccagcggcataacgccgaggataaacgccaggctggtcatcaggatcggacgtaaacgcatccgcaccgcatcaagcgtcgcttcaatcagacctttaccttctttatccatcaagtctttggcgaattcgacgataaggatcgcgttcttcgcgctcaacccaatggttgtgagcaggcctacctggaagtaaacgtcattggtcaggccacggaaggtggcagccagcaacgcaccgataacccccagcggaacgaccagcataacggagaacggaatgctccagctctcgtacagcgccgccagacacaggaacacgacaatcaagctaatcgcgtacagactaggtgcctggttgccggagagacgttcctgataggacatccccgtccagtcatagccaacaccggtaggcagtttgctcgccagttgttccatcagctccattgcttcaccggtacttttacccggtgccgcctggcctaagatttccatggatggcaggccgttgtaacgttccagacgcgggctaccgtactcccaacgagaagaggagaacgcgctgaatggcaccatctgaccatcagcagcacgaacataccagtcgccgatatcatccggcagcatacggtatttcgcttcactcatgacataaactttcttcacacgaccgcggtcgataaagtcgttcacatagctgccgccccatgcagcgcccagagtggtgttaatgtcgttgatagaaacacccagcgcctgcgctttttcctggtcgatatcaatcttaaactgcggggtatcttccagaccgtttggacgtacgctggtcaacatatcagggtgcttcgctgcttctgcaagcaactggttacgcgcctgagtcagtttttcgtgaccaaggccagcctggtcaatcagctcaaagtcaaagccggttgcagtacccagttccacgattgcgggcaggttaaaggcgaaaaccatcgcatctttgatttggctgaaagcgcgtgttgcacgcatggtaatcgcttcaactttgttttcttcgcccggacgatcggcccagtccttcaaggaaacgaacgcaataccggtattctgaccacgtcccgcaaagccgaagccgttaacggcgaacacgctctcaacgttgttcttttctttggtcagatagtaatgcgttacctcattgagcactttctgtgtacgttcctgcgttgcacctgctggcagctgaaccatggtcataaacacgccctggtcctcatctggcaagaaggagcttggcagacgcacgaacagataggccatgccgaccacgatgatcagatacagcaccaggtaacgccccgtactgcgcagaataccgcctacgctgtcggtgtagtggtgcgtgctcttctcgaacatgcggttaaaccagccgaagaagccttttttaccttccccgtgatcgcctttggcaatcggtttcagcatggtggcacaaagagctggagtcaggatcaacgccaccagtacgctcagcgccattgcactaacaatggtaatagagaactgacgatagatagcaccagtagaaccgccaaagaaggccatcggtacgaataccgcgctcagtaccatcgcgataccgaccagagcgccctgaatctgccccatgctcttacgggtagcttcttttggcggcaaaccttcttccgccataacacgctcaacgttttctaccacaacgatggcgtcatccaccaacaggccgatggcgagcaccatcccgaacattgttagcgtgtttatgctgaagccaaaggcggcaaggacggcaaaggtcccgagcaataccaccggtacggcaatggtcggaatcaacgtcgcgcggaagttctgcaggaacagatacataaccaggaacacgaggatgatcgcttcgaccagcgttttaaccacttcgtgaatagagattttcacgaacggcgtggtgtcgtatgggtaaacaattttcagaccgctcgggaagaacggttccatcttcgccagttcagcacggattgccgcagcggtatccagcgcgtttgcaccggtcgccagcttgatccccagaccggaagccggttggccgttaaactctgcgatgatgtcgtagttctcaccacccagctcaatcttcgcgacgtcacgcagcagcacgcgggaaccatcctgattcactttcagcaggattttgccgaactcttcagtagaggtcagacgcgtctgagcaataatagaggcgttaagctgttggcctttcaccggcggcgtaccaccgagctgacccgccgcaacctgggcgttctgcgctttgatggcggtaatgacatcaaccggcgttagctggaatttgttcagctcattcgggttcatccagatacgcatcgcgtactgactaccgaacaactgaacatcacccacgccgctcgtacggctgatggcatctttcatattcgccgccacgtagtcggagatatcctcctgcgtcatggtgccatcggtgttgataacgccgacaaccatcaggaagctgctggaacttttctcaacgctcaccccttgctgctgaacttcttgcggcagcaacggcatcgccagctgcagtttgttctgcacctgaacctgcgcgatatccgcatcagtaccagactcaaaggtcagggtgatctgcacggtacccgtggagtcactgttagaggacatgtacatcaggttatcgataccgttcatattctgttcgataacctgtgtcaccgtgtcctgcactgttttcgcatcagcgccggggtaggaggcggagatcgttactgccggcggtgcaatcgtaggatattgcgccaccggcagtttgaggatcgccagcccccctgccaacatgatgataatggcgatcacccacgcaaaaatcgggcgatcgataaagaaattaggcatgtcttaacggctcctgtttaagttaagacttggactgttcaggctgagcaccgcttgcggcttgctggttattatcagcggtaacttcttgtgcttttacctggacaccaggacgcactttctgcagcccacttattactacgcgatcgcctgctttcagaccttctgtcaccagccacttatcgccaatagcctggcttgcaacgatcggacgggtttccactttgtcatccgcgccaactaccagtacggtggcatcgccacgcggcgtacgggttacgccctgttgcgggactaaaatagcgtttggattaagcccttcttccagacgtgcgcgcacgaacatacccggcagcagagtgtgatccgggttcgggaagatagcgcgtagggtgatagacccagtggtctgatcaacggtaacgtcagagaattccagcgtaccgtcctgcgggaacttaatgccgtcactggtgatcagactcactttggctttgccgttctcttgtttcagcgtgccattcgccagttcctgtttcaggcgcaggaagtcgttgctggactgggtcacatcaacgtagatcggatcaagttgctgcacggttgccagcgcagtcgcctgaccgttctgtaccaatgcgccttccgtcacgttgctcttaccaatgcgaccgctaatcggagaggtgactttggtgtaagccagattgatccgcgcagtttcaacggcagctttcgccgcagttaccgcagcattcgcctgttgcgcatcagccagagcctgatcgtactcttgcttactgatgtactgagtaccgagcagtttctgataacgattcaccgtcaattgcgcgatattggctgcagcctgggctttcgccagatcacctttcgcactgtcgtatgtcgcctgataggtcgcaggatcaatctgatagagagagacacctgcttcgatgtcgctaccttctttgaaattacgcttcaggataatcccgctaacttgaggacgaacttctgcgatccggtaggcactggtgcgacccggaagctcggttgtgatctgcagaggttcagttttgactgttactacgccaacggcgggcatctgctggccaccttgttgggcctgtttgtcgtcacatcctgttagggctaagctgccactgagcatcagaacgaccgccagaggcgtaaaccctctgtttttgttcatatgtaaacctcgagtgtccgatttcaaattggtcaatggtcaaaagttaataaacccattgctgcgtttatattatcgtcgtgctatggtacatacattcacaaatgtatgtaaatctaacgcctgtaaattcacgaacatatggcacgaaaaaccaaacaagaagcgcaagaaacgcgccaacacatcctcgatgtggctctacgtcttttcagtcagcagggggtaagttccaccagcctgggcgagattgcaaaagcagctggcgttacgcgcggtgcaatctactggcattttaaagacaagagcgatttgttcagtgagatctgggaactgagtgaatccaatattggtgaactagagcttgagtatcaggcaaaattccctggcgatccactcagtgtattaagagagatattaattcatgttcttgaatccacggtgacagaagaacggcgtcgattattgatggagattatattccacaaatgcgaatttgtcggagaaatggctgttgtgcaacaggcacaacgtaatctctgtctggaaagttatgaccgtatagaacaaacgttaaaacattgtattgaagcgaaaatgttgcctgcggatttaatgacgcgtcgcgcagcaattattatgcgcggctatatttccggcctgatggaaaactggctctttgccccgcaatcttttgatcttaaaaaagaagcccgcgattacgttgccatcttactggagatgtatctcctgtgccccacgcttcgtaatcctgccactaacgaataaccctgaatctgactccaggatttttcctggacattttcgtcgttgctattctggttcactgcgtcgtgatattcttgcggtttgactttttcaggtcgttcttcaggttcagaaaccttcattcatcatgactatgttccagtattacaaacgaagtcggcattttgtttttagtgcatttattgcttttgtttttgtcttgttatgccagaacacggcgtttgcgcgggcgagtagcaatggtgatctgccgacaaaagcggacctgcaggcgcaacttgacagtctaaataaacaaaaagatctttctgctcaggacaaactggtgcagcaggatctgacagatacattagccaccctcgataaaatcgatcgcataaaagaagagacagttcagctacggcaaaaagtcgctgaagcgccggaaaaaatgcgccaggcgaccgcggcgttaacagcacttagcgatgtcgataacgacgaagaaacgcgcaaaattctgagcacgctgagcttgcgccagctggaaactcgcgttgcccaggcgctggacgatttgcaaaacgcacaaaacgatctggcgtcttataacagccagctggttagcttacagacgcagcccgaacgcgtgcaaaatgcgatgtataacgctagccagcagctgcaacaaattcgcagtcgtctggatgggactgatgtcggcgagacagccttacgtcccagccagaaagtgttaatgcaggcccagcaggcgttgctgaatgcggagattgaccagcagcgtaaaagcctggaagggaacaccgtcttgcaggataccttgcaaaagcaacgtgattacgtgacggcgaacagcgctcgtctggagcaccagttacaactgttgcaagaagcggtaaacagcaagcgcctgactttaaccgaaaaaacggcgcaggaagccgtctccccggatgaagccgcgcgtattcaggctaatccgctggtgaagcaggaactggaaattaaccagcagttaagtcagcgtctgattaccgcgactgaaaacggtaatcagttgatgcagcaaaacattaaagtcaaaaactggctggagcgggcgctgcaaagcgaacgcaatattaaagagcagattgccgtcctgaagggcagcctgctgttgtctcgtatcctttaccagcaacaacaaacgctgcccagcgcggatgaactggaaaacatgaccaaccgcatcgcggatttgcgtctcgaacagtttgaagttaaccagcagcgtgatgcactcttccagagcgatgcgttcgtcaacaaactggaagaaggtcacaccaacgaagtcaacagcgaagttcacgatgcgttattgcaagtggttgatatgcgtcgcgaattgctggatcaactcaacaaacagttgggtaaccagctgatgatggccattaacctgcaaatcaaccagcagcagttaatgagtgtgagcaaaaacctgaaatccatcctgactcagcaaatcttttgggtgaacagtaaccgtccaatggactgggactggatcaaagcgttcccgcaaagcctgaaagatgaatttaagagcatgaaaatcacggtgaactggcaaaaagcctggcccgccgtttttatcgctttcctcgctggtttgccgctgctgttgattgccgggctgatccactggcgtctgggctggctgaaagcgtatcaacaaaaactggcttccgctgtgggttccctgcgtaacgacagccagctcaacacaccaaaagcgatccttatcgacctgatccgtgcgctgccggtgtgcctgattattctcgcggttggcctgattctgttgaccatgcagctcaacatcagcgaactgctatggagcttcagcaaaaaactggcgatattctggctggtgtttggcctgtgctggaaggtactggagaaaaacggcgttgccgtacgtcacttcggcatgccggaacagcagaccagccactggcgtcggcaaattgtccgcatcagtctcgcattgctgcctatccatttctggtctgtggtggcagaactttccccgctgcatctgatggatgatgtgctggggcaagcgatgattttcttcaacctgctgctgattgccttcctggtatggccgatgtgccgcgaaagctggcgtgataaagagagccacaccatgcgactggtcaccattaccgtgctgagcataatcccgattgcgctgatggtgctgactgctacaggctacttctacactacgctgcgtctggcaggacgctggattgaaaccgtttatctggtgatcatctggaacctgctgtaccagacggtactgcgtggcttaagcgtagcggcgcggcgtatcgcctggcgtcgtgcgctggcgcgtcggcagaatctggtgaaagagggcgcagaaggtgctgaaccgccggaagaacccaccattgcactggagcaagttaaccagcagacgctgcgtattaccatgttgctgatgtttgcgctgttcggtgtcatgttctgggcaatttggtccgatttgatcaccgtgttcagctatctcgacagcatcacgctctggcattacaacggcactgaagctggcgctgcggtggtgaaaaacgtcaccatgggcagtctgttgtttgcgattatcgccagtatggtggcctgggcgttgattcgcaacctgcctggtttactggaagtgctggtgctcagccgactgaatatgcgccagggcgcgagctatgccattactaccatccttaactacatcattattgctgttggtgcgatgacggtgttcggaagcctgggcgtctcttgggataaactccagtggctggccgcagcattatccgtaggtcttggttttggtttacaagaaattttcggtaacttcgtctccggtttgatcattctattcgaacgtccggtgcgtattggcgatacggtaaccattggtagcttcagcgggacggtaagtaagatccgtattcgtgcgacaacgattaccgatttcgatcgcaaagaagtgatcatcccgaacaaagcgtttgttaccgagcgtctgatcaactggagcttgactgacactactacgcgtctggtgatccgtctcggcgtggcctatggctccgatctggaaaaagtgcgtaaagtgttactgaaggcggcgactgagcacccaagggtgatgcacgaaccaatgccggaagtcttctttacggcatttggtgccagcacgttggatcatgagctgcgtctgtatgtgcgtgaactgcgtgaccgtagtcgtactgtcgatgagctgaaccgtactatcgatcagctgtgccgtgaaaacgacatcaacattgcctttaaccagcttgaagtgcatctgcacaacgagaagggcgatgaggtgacggaagtaaaacgcgactacaaaggcgatgacccgacgccagcggtagggtaaaaacgaaagggggcaacatttagttgccccgagattgctaacaaagtgcgcgttgttcatgccggatgcggcgtgaccgccttatccggcctacgaaaccgcaagaattcaatatattgcaggagcggtgtaggcctgataagcgtagcgcatcaggcagttttgcgtttgcccgcaaccttaggggacatttagcgaccccatttatttctcacttttccgcctcatcatcgcgcgttaatttcttttcataatcacgctttacaatatccagcgcgcgcagcacggtactggcagggatctgattttcctccagcagcacaatcaaatcgacagccagtttgacatcgtcaggggcattttccagactcatattctctccattgttagcgggttaaacgcgctaacctgttttcgattttttccagcgcatggcggcagcgtgccaggcgcgcttcataggcttccacttcacgatgcagcgtttgctgttccacgagatcggtcacccgcgccagacgggctctgcgttcggcaaccatctcacgtagccgccgctcaaaatcctgatgctgaatacgtttacgctgccagcgggcaattttcggtggtgcactgtcccactcgcgcaaactccaggcggaggcttcacgcgcgatggcttccagttgtgccgccagatgttccgccagccaggccacttgcggcagctgttgctgctcaactgcatgacgaagcgcagccagattatcgcccgcctcgtcgagacaagcctgtagtgttgtcgcacgagtctgaaaaagatgcctgtcgaaacgagcacttagcgtggcgaactgactcaccggggcacaacgctgacgcagcgtagcgagctgtccttccagtttttccagcagcagggcggttttcacgataagacctcaatgaaaatgataattgttatgctaaagtagccactctgtaagctgacaacactcaatatgcaacgaatcattttaatcatcattggctggctggcggtagtgctgggtacgctgggcgtggtattaccggtattaccgacgacgccgtttatcctgctggcggcctggtgctttgcccgttcttccccgcgctttcacgcctggttgctgtaccgcagttggtttggcagctatctacgtttctggcagaaacatcatgcgatgccgcgcggcgtcaaaccgcgggcgattttgcttattttgctcacgtttgccatttctctgtggttcgtccagatgccatgggtgcgcatcatgttgctggtaattctcgcctgtttgcttttctatatgtggcgaattccggtgattgatgaaaagcaagaaaagcactgaagcacaacaatcgcagttgcaattattgcgtacagccagtacattctggcgttttcgagcacaggcgcaggcggtcaaaggttaaacaactgttacttttgatacgtttaaaacgcgccgtgagtaccaccgtaacaagcaggcatacacttatgaccgcgactgcacagcagcttgagtatctcaaaaatagcatcaaaagcattcaggactacccaaaacccggcattcttttccgcgatgtcaccagcttactggaagacccgaaagcttacgctctcagcatcgacttgctggttgagcgttacaaaaatgcgggcattaccaaagttgtcggcaccgaagcgcgtggcttcttgtttggcgctccggtagctctgggtctgggcgttggctttgtaccggtccgtaaaccgggcaaactgccgcgtgaaaccatcagtgaaacttacgacctggaatacggcaccgatcagctggagatccacgttgatgccatcaaaccgggcgacaaagttctggtggtggacgacctgctggcaaccggcggcactatcgaagcgaccgttaaactgatccgtcgtctgggtggtgaagtggctgacgctgcgttcattatcaacctgttcgatctcggcggcgaacagcgtctcgaaaaacagggcattaccagctacagccttgtcccgttcccgggccattaattatcgccagtcttgtgctgcccacgctacggacagcacaagatgtgcattcagcctcgccgttctgacggggctgtgttagcattaccccttcgtgaatccaccttccagcgtttcagagcctgccaatgagttatcaggtcttagcccgaaaatggcgcccacaaacctttgctgacgtcgtcggccaggaacatgtgctgaccgcactggcgaacggcttgagcttagggcgtattcatcatgcttatcttttttccggcacccgtggcgtcggaaaaacctctatcgcccgactgctggcgaaggggctaaactgcgaaaccggcattaccgcgacgccgtgcggcgtgtgcgataactgtcgtgaaatcgagcaggggcgctttgtcgatctgattgaaatcgacgccgccagccgcaccaaagttgaagatacccgcgacctgctggataacgtccagtacgctccggcgcgtggtcgtttcaaagtttatctgatcgacgaagtgcatatgctgagccgccacagctttaacgcactgttaaaaacccttgaagagccgccggagcacgttaagtttctgctggcgacgaccgatccacagaaattgccggtgacgattttgagtcgctgtctgcaatttcatctcaaggcgctggatgtcgagcaaattcgccatcagcttgagcacatcctcaacgaagaacatatcgctcacgagccgcgggcgctgcaattgctggcacgcgccgctgaaggcagcctgcgagatgccttaagtctgaccgaccaggcgattgccagcggtgacggccaggttagtacccaggcggtcagtgcgatgctgggtacgcttgacgacgatcaggcgctgagcctggttgaagcgatggtcgaggccaacggcgagcgcgtaatggcgctgattaatgaagccgctgcccgtggtatcgagtgggaagcgttgctggtggaaatgctcggcctgttgcatcgtattgcgatggtacaacttagccctgctgcacttggcaacgacatggccgccatcgagctgcggatgcgtgaactggcgcgcaccataccgccgacggatattcagctttactatcagacgctgttgattggtcgcaaagaattaccgtatgcgccggaccgtcgcatgggcgttgagatgacgctgctgcgcgcgctggcattccatccgcgtatgccgctgcctgagccagaagtgccacgacagtcctttgcacccgtcgcgccaacggcagtaatgacgccaacccaggtgccgccgcaaccgcaaagtgcgccgcagcaggcaccgactgtaccgctcccggaaaccaccagccaggtgctggcggcgcgccagcagttgcagcgcgtgcagggagcaaccaaagcaaaaaagagtgaaccggcagccgctacccgcgcgcggccggtgaataacgctgcgctggaaagactggctagcgtcaccgatcgcgttcaggcgcgtccggtgccaagcgcgctggaaaaagcgccagccaaaaaagaagcgtatcgctggaaggcgaccactccggtgatgcagcaaaaagaagtggtcgccacgccgaaggcgctgaaaaaagcgctggaacatgaaaaaacgccggaactggcggcgaagctagcggcagaagccattgagcgcgacccgtgggcggcacaggtgagccaacttagcctaccaaaactggtcgaacaggtggcgttaaatgcctggaaagaggagagcgacaacgcagtatgtctgcatttgcgctcctctcagcggcatttgaacaaccgcggtgcacagcaaaaactggctgaagcgttgagcatgttaaaaggtagtacggttgaactgactatcgttgaagatgataatcccgcggtgcgtacgccgctggagtggcgtcaggcgatatacgaagaaaaacttgcgcaggcgcgcgagtccattattgcggataataatattcagaccctgcgtcggttcttcgatgcggagctggatgaagaaagtatccgccccatttgatcgtaagcacagcttacgttcgtcatccttaacgtgattgagagagaaacctatgtttggtaaaggcggtctgggtaacctgatgaagcaagcccagcagatgcaagaaaaaatgcagaaaatgcaggaagagatcgcgcagctggaagtcaccggcgaatctggcgcaggtctggtaaaagtgaccatcaacggtgcacacaactgccgtcgcgtagagatcgacccgagcctgctggaagacgacaaagagatgctggaagacctggtggctgcagcattcaacgacgcagcacgtcgtattgaagaaacgcagaaagaaaaaatggcctctgtatcctccggaatgcagctgccgcctggctttaagatgccgttctgatgcaaaccagcccgctgttaacacagcttatggaagcactgcgctgtctgccgggcgttggcccgaagagcgcgcagcgtatggcgttcacgctgcttcagcgcgatcgtagcggcgggatgcgtctggcgcaggcgctcacccgggcgatgagcgaaatcggccactgcgccgattgccgcactttcaccgaacaggaagtctgtaacatctgtagcaatccgcgtcgtcaggaaaacggtcaaatctgcgtggtggagagtccggcggacatctacgccattgagcagacggggcagtttagtggtcgttattttgtgttgatggggcatctgagtccgctggacggcatcggtccggatgatatcgggcttgatcgtctggaacagcgtctggcagaggaaaaaatcactgaagtgatcctcgccaccaaccccacggttgaaggtgaagctaccgctaactacattgccgagctttgcgcgcaatatgacgtggaagccagccgaatcgctcatggcgttccggttggcggcgagctggaaatggtcgacggcaccacgttgagtcactcccttgccgggcgtcataagattcgtttttaagcaaacgagagcaggatcacctgctctcgcttgaaattattctcccttgtccccatctctcccacatcctgtttttaaccttaaaatggcattattgaggtagacctacatgaaaggacaagaaactcgtggttttcagagtgaagtgaaacagcttctgcacctgatgatccattctctctattccaataaagaaatcttcctgcgtgagcttatctctaacgcctccgatgcggcggacaagctgcgtttccgtgcgctctctaacccggacctgtacgaaggtgatggcgaactacgcgttcgtgtctctttcgataaagacaagcgtacgctgaccatctccgataacggcgtggggatgacccgcgacgaagtgattgaccatctggggactatcgctaaatccggtaccaaaagtttcctcgaatccctgggttctgaccaggcgaaagacagccagctgatcggtcagtttggtgttggtttctactctgcgtttatcgtggccgacaaagtgaccgtgcgtactcgcgcggcaggcgaaaaaccagaaaatggcgtcttctgggaaagcgctggcgaaggtgaatacaccgttgccgacatcaccaaagaagatcgtggtactgaaatcaccctgcatctgcgtgaaggcgaagacgagttcctcgatgactggcgcgtgcgttccatcatcagcaaatactccgaccatatcgcgctgccggtagagatcgaaaaacgcgaagagaaagacggcgaaaccgttatctcctgggagaaaatcaacaaagcgcaggcgctgtggactcgtaacaagagcgaaatcaccgatgaagagtacaaagagttctacaaacacatcgcccacgactttaatgatccgctgacctggagccacaaccgtgttgaaggtaagcaggagtacaccagcctgctgtacatcccgtcccaggctccgtgggatatgtggaaccgcgatcataaacacggcctgaaactgtatgttcagcgtgtgttcatcatggacgacgcagaacagttcatgccgaactatctgcgcttcgtgcgtggtctgattgactccagcgatctgccgctgaacgtttcccgtgaaatcctccaggacagcacggtaacgcgtaacctgcgcaatgcgctgaccaagcgtgtgctgcaaatgctggaaaaactggcgaaagacgacgcggaaaaataccagaccttctggcaacagtttggcctggtactgaaagaaggtccggcggaagatttcgctaaccaggaagcgatcgccaaactgctgcgttttgcttctacccataccgattcttctgcgcagaccgtatctctggaagactacgtttcccgcatgaaagaagggcaggagaaaatctactacatcaccgcagacagctatgcggcagcgaagagcagcccgcacctggaactgctgcgtaagaaaggcatcgaagttctgctgctttccgaccgcatcgatgagtggatgatgaactatctgactgagttcgacggtaaaccgttccagagcgtgtctaaagttgacgagagccttgaaaaactggctgacgaagttgatgagagcgcgaaagaagcggagaaagcactgactccgttcatcgaccgtgtgaaagccctgctcggcgagcgcgtgaaagatgtccgtctgactcaccgtctgaccgatacgccagcgatcgttagcaccgacgcggacgaaatgagcactcagatggcgaaactgttcgctgcggcgggccagaaagtgccagaagtgaaatacatcttcgaactgaacccggatcacgtactggtgaaacgtgcggcagatactgaagatgaagcgaagttcagcgagtgggtagaactgctgctggatcaggcgctgctggcagaacgcggcacgctggaagatccgaacctgtttattcgtcgtatgaaccagctgctggtttcctgatgtaatgccggatgaccttcgtgtcatccggcatttttcttttcatcatctgcactttccgcaaattatctcgccattaaccgtttcagccccaggtgcctttcttgaggcaatcgcctgttggtggtatcgtttatcgctttttcaaaaaattcgacacattttaaggggattttcgcaatgcgtatcattctgcttggcgctccgggcgcggggaaagggactcaggctcagttcatcatggagaaatatggtattccgcaaatctccactggcgatatgctgcgtgctgcggtcaaatctggctccgagctgggtaaacaagcaaaagacattatggatgctggcaaactggtcaccgacgaactggtgatcgcgctggttaaagagcgcattgctcaggaagactgccgtaatggtttcctgttggacggcttcccgcgtaccattccgcaggcagacgcgatgaaagaagcgggcatcaatgttgattacgttctggaattcgacgtaccggacgaactgatcgttgaccgtatcgtcggtcgccgcgttcatgcgccgtctggtcgtgtttatcacgttaaattcaatccgccgaaagtagaaggcaaagacgacgttaccggtgaagaactgactacccgtaaagatgatcaggaagagaccgtacgtaaacgtctggttgaataccatcagatgacagcaccgctgatcggctactactccaaagaagcagaagcgggtaataccaaatacgcgaaagttgacggcaccaagccggttgctgaagttcgcgctgatctggaaaaaatcctcggctaattcgaaagcgcgcacggacagtcccctcgccccctcggggagagggttagggtgaggggaacaggcccgcacaagcaaacttatcagcaatctcaggccggatattcattcggccttttacaaaaacctcaatctgcgctattcctttttctgatttgacctctcacagcaattagttcttcttcctcacttttccgctacaattatcaacaagttgaatcgataagaggcggtaatgcgtcagactaaaaccggtatcctgctggcaaacctgggtacgcccgatgcccccacacctgaagcggtaaaacgctatctgaaacaatttttaagcgacagacgcgtggttgataccagtcggttgttatggtggccattgctgcgcggcgtgattttgccgctgcgcagcccgcgtgtggcgaagctgtatgcctctgtctggatggaaggtggcagcccgctgatggtttacagccgccagcaacagcaggcgctggcacaacgtttaccggagatgcccgtagcgctgggaatgagctacggcagcccaagtctggaaagcgccgtagatgaactcctggcagagcatgtagatcatattgtggtgctgccgctttatccgcaattctcctgttctacggtcggtgcggtatgggatgaactggcacgcattctggcgcgcaaacgtagcattccggggataagctttatacgtgattacgccgataaccacgattacattaatgcactggcgaacagcgtacgcgcttcttttgccaaacatggcgaaccggatctgctactgctctcttatcatggcattccccagcgttatgcagatgaaggcgatgattacccgcaacgttgccgcacaacgactcgtgaactggcttccgcattggggatggcaccggaaaaagtgatgatgacctttcagagccgctttggtcgggaaccctggctgatgccttataccgacgaaacgctgaaaatgctcggagaaaaaggcgtaggtcatattcaggtgatgtgcccgggctttgctgcggattgtctggagacgctggaagagattgccgagcaaaaccgtgaggtcttcctcggtgccggcgggaaaaaatatgaatatattccggcgcttaatgccacgccggaacatatcgaaatgatggctaatcttgttgccgcgtatcgttaaagctgagcggtaaagaactgagcgccgtcgcgaagagcctcgtcggcggttttcatcatccgactataatgcaaaaaggcgtgcagcgtgcctgggtagagtttgaactcacagggctgctgatgcgccgctaacgtctggtaaagcagacggctgtcatccagcagcggatcgaactccgccccggcaataaaacagggcggaacttcgcgagtgagatcattattaaacagacagtaatacgggctctcgcggtccgcgtcgttgcttaaatatgcctcttcgtacatctgcaaatcctgttgcgttaagccatcccagacaccgcccaacagacgacgagtcacggaatcccgtaatccgtaaagcccataccacagcaaaacgcccgcaactttaccgcaatcgatctgtttatcacgcaaccacaacgcactggcgagcgccagcatggcacctgcggaatcaccggcaaagccaatgcgggacatattgatttgataatcctccgcctgctggtggaaataacaacaagcagccacaatttcctctatcgcttgcggaaaacgcgcttcaggactaagggtgtaatcaataccaatcaccgtacattggctgtagcttgccagcaggcgcatgatgcgatcgtgggtatcgagattgccgagaataaaaccgcctccatgcaaataaaatagcgtcgctgggctatctggctgcggacaaaagagacgtgtttccacctgcccatattttgttggaaccatgtaagctctggttgccatttctggagcgcccgcattccagaatcggcgctcaagcgtgtaatactgtcgttgctcagcaatcgttcccgttgcgggccagggcggtaaatccggctgaagagtattcacaacggtcttcatttcagcagaaataaggtccagaacaggtagtttgttttccggcttcatacaaaaactcctttcaaattacgtcattgtaaggaaccactgccatgaaaatgcgatcccgcctgctgatattgaaactggctgcgtctcgcgcgctcccgtcagattgtgttaacattcgccgctcagttaaccacccgtaaaaacaaccatgaaatttcccggtaaacgtaaatccaaacattacttccccgtaaacgcacgcgatccgctgcttcagcaattccagccagaaaacgaaaccagcgctgcctgggtagtgggtatcgatcaaacgctggtcgatattgaagcgaaagtggatgatgaatttattgagcgttatggattaagcgccgggcatagtctggtgattgaggatgatgtagccgaagcgctttatcaggaactaaaacagaaaaacctgattacccatcagtttgcgggtggcaccattggtaacaccatgcacaactacagcgtgctcgcggacgaccgtagcgtgctgctgggcgtcatgtgcagcaatattgaaattggcagttatgcctatcgttacctgtgtaacacttccagccgtaccgatcttaactatctacaaggcgtggatggcccgattggtcgttgctttacgctgattggcgagtccggggaacgtacctttgctatcagtccaggccacatgaaccagctgcgggctgaaagcattccggaagatgtgattgccggagccagcgcactggttctcaccagttatctggtgcgttgcaagccgggtgaacccatgccggaagcaaccatgaaagccattgagtacgcgaagaaatataacgtaccggtggtgctgacgctgggcaccaagtttgtcattgccgagaatccgcagtggtggcagcaattcctcaaagatcacgtctctatccttgcgatgaacgaagatgaagccgaagcgttgaccggagaaagcgatccgttgttggcatctgacaaggcgctggactgggtagatctggtgctgtgcaccgccgggccaatcggcttgtatatggcgggctttaccgaagacgaagcgaaacgtaaaacccagcatccgctgctgccgggcgctatagcggaattcaaccagtatgagtttagccgcgccatgcgccacaaggattgccagaatccgctgcgtgtatatagccacattgcgccgtacatgggcgggccggaaaaaatcatgaacactaatggagcgggggatggcgcattggcagcgttgctgcatgacattaccgccaacagctaccatcgtagcaacgtaccaaactccagcaaacataaattcacctggttaacttatagtagcttagcgcaggtgtgtaaatatgctaaccgtgtgagctatcaggtactgaaccagcatagtcctcgtttaacgcgcggcttgccggagcgtgaagacagcctggaagagtcttactgggatcgttaagttatcgtcggttcgtaggccagataaggcgttcacgccgcatctggcatttggctctcgatgcctgatgcgacgctggcgcgtcttatcatgcctacatatttttcatattttacatccggcaaccaccgtttaccccgtcaccacctcacccgccggtggcgtttccagcagttccagcatggtacgggcgatttcacgctcgcccatcactacctgattcgcaccacgttcggtgatatacgccacttcatcgtcataatgggcgcgggcaataatctcaatatccggatttttcgcgcgggcagatgccacaatctcacccgcttcataaccgttgggaatcgtcaggatcagccattttgcacattccagatgcgccagttgcataatttcttcgttcgccgcattgcccaatactgcgcggaccccgcgctctcgcagctcatcaacacgggttcgactcgtctcaatcaccaccagcggaatatcagaggcgagcaatttctcccccagcaggctgcctacacgaccgtaacccaccagtagcgcatggttgcaaatatccactgggatctgcttctcttcttcgattgcctcttccagcgtctgctcttccagcgtttcggtcttcgccagatatttctccagtagtgcgaacagtaccgggttgagcataatgctcaggatcgcccctgccagtaccaggttttgtccggcctgcggcagtaaattcaatgccattcccagtcccgccaggataaacgcgaactcaccaatctgcgccaggctggcggcgatggttaatgccgtacgttgggagtgaccaaacagtcgcaccaggaaaaatgcggctaagctcttaccaaacagaataatcgccagcgtcgccagcactgccagcggttgctgaatcagaattaacggatcaaacaacatcccgacggagacaaaaaacagcaccgcaaacgcgtcgcgcaatggcagcgtatcgtgggcggcacggtgactcagttcagactcgttcagtaccatcccggcaaagaacgcaccgagtgcaaaggagacatcaaacagctctaccgcaccaaaggcaacccctaacgccagcgccagcacgctcagggtaaacagctcgcgagaaccggttgccgcgctgcgtgccataatccacggcaccagacggcgacctaccagcatcataatggcgataaatgcgatcactttgccgatggtgatccccatatcgactgcaagagtggcaaagcccacatcgccctgttccatcattcctgccactgcgggcagcaacaccagcgtcagaaccattaccaggtcttccacaatcaaccaaccgatggcgatttgcccacgctgactgtcaattaattgccgttcttcaagtgcgcgcagtaacaccacggtactggcggtggaaagacataaaccgaacacgataccggtcattaagctccagcccagcacggcagagagcgccatacccagcagcgtcgccacggctatctgggcgatcgcaccgggaatggcgatggcctttaccgccatcaaatccttcaggctaaagtgcaaaccgacgccaaacatcaacagaatgacgcccagttcagccagttccggggcaagcttggtatcggcaacaaagcccggagtgaatggtcctgccagcacacccgctaacagatatcccaccagaggagaaatacgtagtttattggccagcatgccgaggataaaggcgagcacaaggccgccaacaatggtggtgataagcggggtggcgtgatgcattccgtctccttttcctggtggttattgtccatttttggccgggaaaaccaaaattacaggtaatagtttatgacaatttcattgatgatgttcatgaataattattgaattttgcagaaaaatggaattagctgcaaaaaaagcacggatcggaaaacagaaggcggtttaacagaggaaaggcttatggcgactgtaaaacgatgcagccaaagtttgcctttggctgcaatgaaatcagtctttatgccggttatcaggcaggaatatggtcaacatccccaatagtggcaggaaagcacagattttatagactaactcgatgctggtgtgatcggcgataagccccagaactgccgctcccagacctcccatgccaaaagcaaaaccgaaaaagagtccagaaaccataccgatacgtcctggaagcagctcctgagcgtagaccagaatggcagagaatgcgctagcgaggataaatccaataatcaccgttaaaacccccgtccagtgcaggctggcgtagggtaaaatcagcgtaaacggcgcaacgccgaggatagagccccaaatcacatatttccgcccaattttatcccctacaggcccgccgatcaccgtacctgccgcaacggcaaacaggaaggcaaacagatgaagctgagcattctggatagataatccgaatttttgcatcagataaaaggtgtaatagctgctgatgctcgccatatagaaatatttgctgaaaatgaggattaacagaatgctgaccgccagtacaactttattgcgcggcagtggattgataatcgtcgctttgggttttcctttattcattcggtgctgtgcgctgtaccaacggctgatttgcgccaacaccacgatcgccagcagtgccgcaagcacaaaccaggcaacgttgcctttgccataaggcgcgataatcaccgccgccagcaagggtcccagggaactgccaaagttgccgccgacctgaaagatagattgcgccaggccatgccgcccgccggaagccatacgggccacgcgagaagattccggatgaaagacgctactaccggtaccgaccagcgccgccgccagcagaactgcgccaaaactgcccgccagcgcaagcagcaccagaccgcttaaggtaaagcacatgccaattggcaagctccatggcatcggatatttatcggtccagtagccgaccactggttgcagtaggctagaggcgagctggaaggtgagggttatcatgccaatctgcataaatgtcagagaaaattcactctgaagcagcggataaatcgccagaatcaggctttggatcatgtcgttcagcagatgactgaggctgatagcacctaaaataccaaagcttgttcgggccttggtcgtactcgcagccgcgcccgccacaggctggggttgttcactcattgccataggaaagtcactttttcagggttgcgatgtaaagaatgatcttatttgtgattattaccagactaacatacctgtatgcgtcgtctgaaggaagtctcaacgccgaatacagaatttctaatctggatgcagatttatcttcaccggacgcagacttgtctatgatgtcgcgtcatactatttttcaacacgttgaaatcaggtcagggagagaagtatgaaattattgcagcggggcgtggcgttagcgctgttaaccacatttacactggcgagtgaaactgctctggcgtatgagcaggataaaacctacaaaattacagttctgcataccaatgatcatcatgggcatttttggcgcaatgaatatggcgaatatggtctggcggcgcaaaaaacgctggtggatggtatccgcaaagaggttgcggctgaaggcggtagcgtgctgctactttccggtggcgacattaacactggcgtgcccgagtctgacttacaggatgccgaacctgattttcgcggtatgaatctggtgggctatgacgcgatggcgatcggtaatcatgaatttgataatccgctcaccgtattacgccagcaggaaaagtgggccaagttcccgttgctttccgcgaatatctaccagaaaagtactggcgagcgcctgtttaaaccgtgggcgctgtttaagcgtcaggatctgaaaattgccgttattgggctgacaaccgatgacacagcaaaaattggtaacccggaatacttcactgatatcgaatttcgtaagcccgccgatgaagcgaagctggtgattcaggagctgcaacagacagaaaagccagacattattatcgcggcgacccatatggggcattacgataatggtgagcacggctctaacgcaccgggcgatgtggagatggcacgcgcgctgcctgccggaagcctggcgatgatcgtcggtggtcacagccaagatccggtctgcatggcggcagaaaacaaaaaacaggtcgattacgtgccgggtacgccatgcaaaccagatcaacaaaacggcatctggattgtgcaggcgcatgagtggggcaaatacgtgggacgggctgattttgagtttcgtaatggcgaaatgaaaatggttaactaccagctgattccggtgaacctgaagaagaaagtgacctgggaagacgggaaaagcgagcgcgtgctttacactcctgaaatcgctgaaaaccagcaaatgatcagcctgttaagtccgttccagaacaaaggcaaagcgcagctggaagtgaaaataggcgaaaccaatggtcgtctggaaggcgatcgtgacaaagtgcgttttgtacagaccaatatggggcggttgattctggcagcccaaatggatcgcactggtgccgactttgcggtgatgagcggaggcggaattcgtgattctatcgaagcaggcgatatcagctataaaaacgtgctgaaagtgcagccattcggcaatgtggtggtgtatgccgacatgaccggtaaagaggtgattgattacctgaccgccgtcgcgcagatgaagccagatagtggtgcctacccgcaatttgccaacgttagctttgtggcgaaagacggcaaactgaacgaccttaaaatcaaaggcgaaccggtcgatccggcgaaaacttaccgtatggcgacattaaacttcaatgccaccggcggtgatggatatccgcgccttgataacaaaccgggctatgtgaataccggctttattgatgccgaagtgctgaaagcgtatatccagaaaagcagcccgctggatgtgagtgtttatgaaccgaaaggtgaggtgagctggcagtaatccgaaagtgccggatgtttgcatccggcacaatgcttaatcgcggcgggcgatatcagcaaatttggcatcgaggatctttgccagatcgcctgccgccagttcgatatccagtccgcgcttgccgccggaaacataaatagtggcaaattcttgtgcgggggcgtcgataatcgttggcagacgttttttctgccccagtgggctaatccccccaaccaggtatcccgtgctacgctgcgcgaccatcggatcggccatctcaactttcttggcacccagcgcttttgctacttttttaagatccagttgacctgcgaccggcgtaacggccacggcaaggtgtttcatatcaccgttcactgccaccagcagcgttttgtagacctgatccggattcaaacctaattttttgacgacttcatcgccaaaattggtttcagccggatcgtgctcgtaggtatggatttgaaagctaatcttgtttttttcgagtaatttaactgcgggtgtcatggtaattttcctgccttaaacaaaaaaacgaagcaagcatacgcctgatggcggtccaaaaaaaagagtcatcttgcctaagagtattggcaggatggtgagattgagcgacaatcgagttacaccgtcgcttaaagtgacggcataataataaaaaaatgaaattcctctttgacgggccaatagcgatattggccatttttttagcgcaacatttgcggcaaattcccttctccatacaggtgtagtgcaccgaccgcgaccacatatcgccccggcggcatggcgcgtaatttatcccgccaggcgagatttcgctgatgcatcagcacatcgtacaggctctgactgaacgtattgggcagcgttatatcattattttgcggcggtgcattcagccaccagctcatcatttgttgcagcaaccgtgcgttggtatgccagtgggtcagcgtatcgtccagcagcgccagtcctttgtcagggagctggagcaacatggcaatctggttttcagccccttccagttcaatcacgggtttatgttgttgcttcgccgcctgcaatagctggtaatcgataccgtattctgcccgcagccccagtttttgtgcctgcgtcgcctgaagaaccatcgcgatttgccacagcggttgggtagaaaagagactgggagaaatgcccatctcctggctaatgtgctgcaggttttggagttgctcctcgctaatgcgctcttccagcgcctcgcaggcaggcaaattagcaaaaggcgtatcgctggtggaaacatccgcctcgacgatcagcgcatcggcgtttttgagctttttgagcaaacgggtgggcaggggagccatatcgtggctacccatatgaatactgccaatcagatgaaaatggcgattgccggggagggtgatatcgatggcaggccaggtgtaatgattaccgcgcagcgcggcccaaagcgtttttacccggtacaacagatccatacgacctccctttgtgaaatatcatgctagcgcgcggtgagggatggcgcaaatggagttggagacttgtttaatgtgtttgtatgattcagtatgttcttgcatcgctattcacaaggaagcaacagttaaaaaccatgaaacaggcaacaagaaaaccgacgacacccggagatattcttctctatgaatatctggaaccgctcgatttgaaaatcaatgagttagcagagttgctgcatgttcatcgtaatagcgtcagtgcactgatcaataacaatcgtaaactcactactgagatggcatttcgtctggcgaaagtttttgataccacagtcgatttttggctaaacctccaggcggcggttgatctttgggaagttgaaaacaacatgcgcacccaggaagaattgggacggattgaaacagtggctgaatatttggcacgccgtgaagagcgtgcaaaaaaggtcgcgtaaggccaaaacatcgcttcatctcgtaggccggataaggcgttcacgccgcatccggcatccgagcaccattgcctgatgcgacgcttacccgtcttatcaggcctacaaacttgtgcctgaaccgtaggccggataaggcgtttacgccgcatccggcatccgagcaccattgcctgatgcgacgcttacgcgtcttatcaggcctacaaacctgtgcctgaaccgtaggccggataaggcgtttacgccgcatccggcagtcatgcgtcgatgccaaatgcgccaccctaaagcagcgcatccgcaatgatgtacttattccttcggtttaaaccgcagcaaccggttggcgttactcactacggtaatgctgctgagcgccattgccgctccggcaactaccgggttaagcagtgttccagtgaacggccacaaaataccggcggcgaccggaataccgatactgttgtagataaacgcaccgagcaggttctgcttcatgttgtgcagcgttgcgcgggaaatagcgagcgcatccgcaacgcccatcaggctatggcgcatcagggtaatcgccgcggtttcaatggcaacatcactgccgccacccatcgcaatgccgacatccgcctgagccagcgctggcgcgtcgttaatgccgtcgcccaccattgccacctgacgtccttcactttgcagatgtttgatcgcttcggctttaccgtccggcagcaccccggcgatcacctcatcaatccctgcttctttggcgatcgcattggcggtggttgggttatccccggtcaacatcaccagacgatatcccgctttatgcaggcgttgcagcgccgccacgctatcactacgcaacggatcgcgtactgccagcagggctaccgctttcccgtcaaccgccagcagcacaggcgttgccccttggcttgcctgagcagtaatctccgcttcgatagctttggtaccaacctgttgctcatttaacagcgcctgattgcccagcaataacgcatgaccttcagcttcaccgctcacgcccagcccgcgcaatgtgcggaaaccgttgacctgcggtagctgcatatcacctgctttatcgaggatcgctcgtgccagcggatggctggaaccttgctccagtgccgccgccagacgcaatgcctgcgcttcatcaacatcagcaaatgttttcactgcgacaacctgcggcttcccttcagtcagcgtcccggttttatcgaacactacagtgtcgagtgtactggcgcgttgcagcgcgtcagcgtcccgcaccagcacgccaaactcagccgcccgcccgacgccggaaataatgctcatcggcgtcgccagccccagcgcacacggacaggcaataatcagtaccgtggtggcaatcaccagggtatagacaatctgcggtgccggaccaaagaaataccagattgccgcactgacaagcgcaataaccaccactaccggcacaaatacggcactgattttatccgccagctgaccgatttctggcttgctgctctgggcctggcgcaccatgcgaatgattcgactcagcgtagtatggctgccaaccgcactggcacgaaacagcacactgccgtcctgtaccactgtcccggcatggacgctatcgccttcgcctttttgctgcgggattggttcgcccgtcagcatcgcttcatccagccatgcttcgccctgggtaatctcgccatctaccggcacgcgatcgccggtcgtcaggcgcagcaacatacctggctgcacttctgccagaggcacgcttttttcaccttcgtcagtaaccaggcgtgccgtcggcggggttaaatcgagtaacttttccagcgccttagaagaacgctggcgtgcgcgcgcttccagcatatggccgagattgatcagaccgataatcatcgcgctggcttcgtaataaagatgtcgcgcttccatcgggaaccactgcggccacaggttgacgctcatgctatagagccacgccacgccagtacccagcgccaccagcgtatccatcgtcgccgcaccgttcagcaggcttttccatgcactgcggtaaaaatggccgccggcgaaaaccatcactgccagggttatcaggccgataaccaaccacaggctgcggttgtcagcggtgaccatcatgttatcgccgatcatcccccagaccatcaccgggatacccaccgccagtgcgacaattgcctgccagcggaagcgcttcatcgtagcgacggcggtttcttgctggcgctcgcggcgtttagcgtcatcttcaatcgcttccgcgccgtagcccgctttttccaccgcctgcactaaatcttgtggggaggcactgcccatcaccagcgcagtacgctccgccaggtttacccgtgcctgagtgacgcccggtacgctttgcagcgcattttgtacgcgggtgacacagctggcgcagctcatgccgctcagcagcaactgctggctgtcatcgtcatcggcggtcgctgccggaagcgcctcagaaaccgctgtcagtgcttcgctcgggatactactctccgccagcggtttagcctttgggtggcttacagatgcgtcataacccgcttgtttgatggtttcgatcagctgttctgcactggcagtcccggtaacgtgcgcttcagtgatagacacatccgcctgctcaacatccggacgctgttcaagactttctttcacgcgtttaacgcagtgaccgcaggacaggccgtccagggtcaggtcgatagtttgactcataaaacactcctttaagacagttttgactggctgtgataaaggttaaaccttccagcaaggggaaggtcaagaaattaataaaccaggcgggtaaaagtccgtaaagattaaaaaatcggctcgatttgcatcaggattagacatttatctctttgttttcctgtagttaagttgcgggtgctaagttaaatcaggatgcctgaaaatcggcaccggggtgaggaattacctcccgcatctataaaaaggagttaacaaaagatgttagatgcaaacaaattacagcaggcagtggatcaggcttacacccaatttcacagtcttaacggcggacaaaatgccgattacattccctttctggcgaatgtaccaggtcaactggcggcagtggctatcgtgacctgcgatggcaacgtctatagtgcgggtgacagtgattaccgctttgcactggaatccatcagcaaagtctgtacgttagcccttgcgttagaagatgtcggcccgcaggcggtacaggacaaaattggcgctgacccgaccggattgccctttaacagtgttatcgccttagagttgcatggcggcaaaccgcttagcccactggtaaatgctggcgctattgccaccaccagcctgattaacgctgaaaatgttgaacaacgctggcagcgaattttacatatccaacagcaactggctggcgagcaggtagcgctctctgacgaagtcaaccagagcgaacaaacaaccaacttccataaccgggccatagcctggctgctgtactccgccggatatctctattgtgatgcaatggaagcctgtgacgtgtatacccgtcagtgctccacgctcctcaatactattgaactggcaacgcttggcgcgacgctggcggcaggtggtgtgaatccgttgacgcataaacgcgttcttcaggccgacaacgtgccgtacattctggccgaaatgatgatggaagggctgtatggtcgctccggtgactgggcgtatcgtgttggtttaccgggcaaaagcggtgtaggtggcggtattctggcggtcgtccctggagtgatgggaattgccgcgttcagtccaccgctggacgaagatggcaacagtgttcgcggtcaaaaaatggtggcaagcgtcgctaagcaactcggctataacgtgtttaagggctgatcatgatgaacacggaaggtaataacggtaacaaacctctcggtctatggaacgtcgtttccatcggcattggggcaatggtgggggcggggatcttcgcgctgctggggcaggctgcattgctaatggaagccagcacctgggtcgcctttgcttttggcggtattgtggcgatgttttccggttatgcctatgcgcgtctgggggcgagctatcccagcaatggcggcattatcgacttctttcgtcgcggattaggcaacggcgtctttagcctggcgctcagcttactgtacctgttgacgctggcggtgagcatcgccatggtcgcccgtgcttttggcgcttatgccgtgcagtttttgcatgaaggcagccaggaggagcaccttattttgctctacgcgttggggatcattgcggtgatgacgcttttcaactccttaagcaaccatgcggtagggcggctggaagtgatcctcgtcggcattaaaatgatgatcctgttattgctgattattgccggtgtctggagcctgcaaccggcgcatatttccgtctctgcgccccccagctccggtgcgttcttctcctgtattgggataactttccttgcctatgcgggctttggcatgatggcgaacgcggcggataaagtgaaagatccgcaggtcattatgccacgggcgtttctggtggcgattggcgttaccacgttgctttatatcagcctggcactggttttgcttagcgatgtaagcgcattagagttagaaaaatatgccgataccgccgtagcgcaggctgcttctccgctgctcgggcatgtgggttatgtgatcgtcgtcatcggcgctttactggcgacggctagtgccattaacgcgaacctgttcgccgtgtttaacatcatggacaacatgggcagcgaacgcgaactgccgaagctaatgaataaatccctgtggcggcagagtacctggggcaacattattgtcgtggtgttgattatgctgatgacggcggcactgaatttaggcagtctcgccagcgttgccagcgccacctttttgatttgctacctggcggtgtttgtggtggcgatccgcctgcgtcatgatattcacgccagcttgccgattcttatcgttggtacgttggtgatgttgttggtgatcgttggctttatctacagtctgtggtcccagggtagccgtgcgttgatatggattattggcagtctcttactcagccttattgtggcaatggtcatgaagcgcaataaaaccgtataacatctctctgtgcgcagtacttcctgtattattgtggtggcggtcgatattcgcactggcaaaaaaacgtgcttgaatatctgttgaaaccctttaacaaagcacaggaggcgttgcgcgaacgatgaacatcagcgatgtagcaaaaattaccggcctgaccagcaaagccattcgcttctatgaagagaaggggctggtgacgccgccgatgcgcagcgaaaacggttatcgcacctacacgcagcagcatctcaacgaactgaccttactgcgccaggcacggcaggtgggctttaacctggaagagagcggcgagctggtgaatctgtttaacgacccgcagcggcacagcgccgacgtcaaacggcgcacgctggagaaggtggcggagatcgaacgacacattgaggagctgcaatccatgcgcgaccagctgctggcactggcgaatgcctgccctggcgatgacagcgccgactgcccgattatcgaaaatctctccggctgctgtcatcatcgggcagggtgattaagagctgacggctcggatatgtagggttatcccttctatcgcaatgacttcaacatgcgtacctgcaccgagatcctcgctggcgctgacaggccaactactgtcaccgacgcgcatatgaccgcgcccgttgaccagcggagattccagcacaaaacgtcggccaatcagctgctgcccgcgctggtttaaatgactatcgctgtgcttttgttcgcgcacccgccggctcaaccatttccaccacagccaggcggcgagcagcgtcaggatggcaaacattaccccttgccactcccaacccagcggcaccagccagaccaccaggccggtaatcaccgctgccacgccgctccacaacaaataaccatttccgcccagcatctcggctgccagcagcaaaccgccgagactgagccagaaaatatgtggatgaacgaccattaactccatcatggctgagtccgtttgttggcgctgtctttcaccagctcggcaatcccggcaatgctccccatcaggctgctggcctctaatggcatcatcactactttgctgttactggaggaaccgatctgctgtaacgcttcggtgtatttctgcgctacgaagtagttcaccgcctgaatatcaccggaggcgatagcttcagacaccattttggtggcgcgggcttctgcttcggcggaacgttcacgcgcttcagcctgtaaaaacgcgctctgacgttcgccttccgctttcaggatttggctctgtttttcaccttcggctttgaggatttccgcctgacggatcccttccgcttcaagaatgtaagcgcgtttggtacgttccgctttcatctgcgcgttcatactagagataagctctgccggtgggcgcacgtcgcgaatttcaatacgggtgactttaatcccccacgggttggtggcttcatcgacaatacgcagcaggcgactgttgatgctgtcgcgctgagagagcatttcgtcaagttccatactacccagcacggtacggatgttagtcatggtcaggttgatgatcgccagctccagattgctgacttcataagccgcgcgcggcgcgtcaatcacctgaataaagcacacggcgtcgatggtaacgttggcgttatctttgctgataacttcctgggaagggatatcgagcacttgctccatcatattgatcttgcgaccaatgcgatccataaacggcaccaccagactgagccccggctgtaacgttttggtatagcgaccaaagcgttctactgtccactgatagccctgcggtacgattttgacacccgcgccgacaatgaccagcgcgacaaaaatgagaatcgggataaagataagcatcggaaaaacctcctgttgtaccgtccataatcagcaaaattgctgcttgattaaacaaattatacctgattactgaaagagagttcccccttattcctgcgaaggataaactgtttttagtaaaaatcagaaaaagggaacagcgatgcaggaaaatagtcctttgcttcagctacaaaacgtaggatatctggcgggtgatgcgaagattcttaataacatcaattttagcctgcgtgctggcgaatttaagttaattaccggtccttctggttgtggcaaaagtacgctgctaaaaatagttgctagtttgatcagcccaaccagcggaacgttactgtttgaaggtgaggatgtcagcacactaaagccagaaatctaccgccaacaagtctcttactgcgcccagacaccgacgctgtttggcgatacggtatacgataatctgatctttccctggcagatccgtaaccggcagcctgacccagccatttttctcgattttctcgaacgcttcgccttgccggacagcattttgacgaagaatatcgccgagctatctggtggtgaaaaacaacgcatcagtttgattcgtaacctgcaatttatgccgaaggttttattgctggatgaaataaccagtgcgctggatgaaagtaataaacataacgtcaatgagatgatccatcgttatgtgcgcgagcaaaatattgccgtgctgtgggtgacacacgataaagacgaaattaatcatgcggataaagtgattacactgcaaccgcatgccggagaaatgcaggaagcacgctatgaactcgcataactaaagaaatgcaggaagcacgctatgaacagccataatattactaacgaaagtttagcactggcattaatgctggtggtggtggcaatcttaattagccataaagaaaaactggcgctggagaaagatattctctggagcgtcgggcgagcgataattcagctgattattgtcggctatgtgctgaagtatattttcagcgtggatgatgccagcctgacattattgatggtgttatttatctgctttaatgcggcgtggaacgcgcaaaaacgcagtaaatatattgctaaagcttttatcagtagctttattgccattacggtcggggcgggaattaccctggcggtgctgattctcagtgggagcattgaatttatcccgatgcaggtgatccctatcgccgggatgattgccggtaacgccatggtagcggtggggttgtgttacaacaatttagggcaacgggtcattagcgaacagcaacagattcaggagaaactgagtcttggtgcgacgccgaagcaggctagtgcgatattgattcgcgacagtattcgcgcggctttaattccgacggtcgatagtgcaaaaacggttggcttagtgagtttaccaggaatgatgtccgggctgatatttgccgggattgatccggtgaaggcgattaaatatcagattatggtgacctttatgctgctcagtaccgccagcttgagcaccattattgcctgctatttaacctatcgtaagttttataatagccgccaccagttggtggtgacgcaattgaagaagaaatgatgcgatgccggatgcgcagcatcgcatccggcgttgtggttcatgtgccgatcaacggaatatcaatacaacaatgcatacagctggcggcgatacttgctcgccagtgcatcacccgtacccagcgcagcgaggatctcctggaacgttttacgcgtctgaccgtctgcggcggtgagatctttacgcagatgcccgaacagcaactccagcgcctcttcattgcgcccaacctgatgcagttgcagcgccagttgcgtcgccagtgcggcatcttctggattctccgccacctgctgttgcaactgttgaatttccggcgtatcagccgcctgcttcagcagttcgatttgcgccaccagcccctggtagcgggtgtcctgatcctgcaacggaatggttttcagcaccgcttccgcatcttcagaacggttcagcgcaatcagcgtttctgccagcagcaggccgatctccccgttctgattgctcaactgccaggcgtctttcagcaatggcagggcatcggtgtaattgctttcctgcatcagttgcatcgcctgctgcgctttcagctcttcttcgcgcggcagcactttatccagcagggcgcggatcgcctcttccggttgcggcccctggaagccatctaccggttgcccgttctggaacagatacacggtcggaatcgcacgcagaccaaactgcgcggcaatcatctgctccgcgtcgcagtccagcttcgccagaataaattgcccgttgtactgcgccgcgaggctttccagaattggggttaactgcaaacagtgctggctacgttcagaccaaaaatagaacagcaccggagtggtcatgctctgttcaagaacctgttgcaggttagattcgttaatgttgacaatattttctacggacatggagtcgctctctgttgtcgatattttctttgacatgggggcttaagcgcgcgcttcaactcacccctgcaatattttgtccatcacgcgccccggcagcaggcgcttaagcaccattaccgcccaggtcaccagcgtcaccggatagcgcatcttcggcttctcgctaataaaagcatggcgtactttgtccaccaccgcttccggtcccaacgtaaagcgggcggcgatgccgggattttcgactggtttatcactttgcgtctggttgacgttgtcggtgaagcgagtacgaatgggaccgggttcgatcaggctgactttaattccgctgtggcgcagctccatgcgcagtgcatcactccacgcctccagcgcatatttactggccgcgtaagcgccacgacccggcgtggagattaatcccatcacgctacttgtcatcacaatacgcccttcaccgtgcggtaacatcgcgggtaacaggcgcatggtgagctggtgtgcgccgaaaaagttggcggaaaactgctgttccatctgcgcacggctgatggtggaaagggggccatacatgccgaatccggcattgttaaagatcccatacagacaattatcggtcagggcgatcacctcgtcggctgcgcgatcaacactttctggactatccagatcgatcaacacgccggtaaatcccatgctgttcatgcgctcaacatcatccggtttccggcaacctgccagcacatgaaaaccctggcgttttaattcgagcgcgctttccaggccaattccactggaacatccggtaattaagacgcttttttgcataactttacctgtcaggatctccgttgctttatgagtcatgatttactaaaggctgcaacttatttaactgtcatgatttactaaaggctgcaactgcttcgccatccagtcggcaataaacggctgggcgtcgcggttgggatgaataccgtcatcctgcatccattgtggcttgaggtagacctcttccataaaaaagggcagcagcggaacatcaaactctttggcgagtttggggtaaatggcgctaaaggcttcattataacggcgaccatagtttgcaggcagacgtatttgcattaacaatggttcagcgttggcggctttgacatcctgcaaaatctggcgcagcgtttgctcggtttgctgtggctgaaaaccacgcaaaccgtcattgccgcccagttcaaccagcacccaacgcggctgatgctgtttcagcagagccggaaggcgcgccagtccttgttggctggtgtcgccgctgatgctggcattaactacgctcgttttactctgccacttatcattcaacaaggcaggccaggccgcgctggcagacattcgatacccggcgctcaggctatcacccagaatcaataacgtgtccgctgcggcggcacggaaggttaacaggaccaggaacaggaagggcaaatgccagcggaaaacattgttgaagttcatcatcttaagaagtccgtcggtcagggggagcatgaactctccatcctcaccggagttgagctggttgtcaaacgtggcgagaccatcgcactggtgggcgagagcggaagcggtaagagtaccttgctggcgatcctcgccgggcttgatgacggcagcagtggcgaagtgagtctggtgggacaaccgctacataatatggacgaagaagcgcgggcaaagttgcgcgcgaagcacgtcggctttgtttttcagagttttatgttaattcctacccttaacgcgctggaaaacgtcgagcttccggctctgctgcgcggtgagagtagcgcggaaagtcgtaacggggcgaaagcgttgctcgaacagttagggctgggtaaacgtctggatcatcttccggcacagctttccggcggtgaacagcaacgagtggcgctggcacgagcctttaatggtcgacctgatgtgctgtttgccgacgaacccaccggcaaccttgaccgccagacgggcgataaaattgccgacctgctgttttccctcaaccgtgaacatggcaccacgttgattatggtgacccacgacctgcaactggcggcacgctgcgaccgctgcttacggctggtgaacgggcagttgcaggaggaagcatgattgcacgttggttctggcgcgaatggcgtagcccgagcctattaattgtctggctggcgctaagcctggcggtggcctgcgtgctggcgctgggcaatatcagcgatcgcatggagaagggcttaagccagcaaagccgtgagtttatggcgggcgatcgggcgttgcgcagtagtcgcgaagtgccgcaagcgtggctggaggaagcgcaaaagcgcggcctgaaagtcggcaagcagctgactttcgccacaatgacctttgcaggcgacacaccgcagctggcgaacgtcaaagcggtggatgatatctacccgatgtatggcgatctgcaaactaatccccctggcctgaaaccgcaggcgggcagcgtattgctggccccacgcctgatggcactgcttaacctgaaaacgggcgacaccattgacgtgggcgatgccaccttgcggattgccggagaagtgattcaggaaccggattccggttttaaccccttccagatggctccgcgtctgatgatgaatctggcggatgtcgataaaaccggagccgtgcagccggggagtcgggtcacctggcgttataaattcggcggcaacgagaaccagctcgacggctatgagaaatggttgttacctcagcttaaacccgaacaacgctggtacggtctggaacaggacgaaggcgcgctggggcgaagcatggaacgcagccaacagttcctgctgcttagcgcgcttctgaccttgctgctggcagtggcagcggtggcggtagcgatgaatcattactgtcgcagtcgctacgatctggtggcgatcctcaaaacgctgggggcagggcgagcgcaactgcgtaagctaatcgtcggtcagtggttgatggtgctgacgcttagtgccgttaccggtggggccataggcctgttgttcgaaaacgtgttgatggtgctgctcaagcccgttctgcctgctgcactaccgccagccagcctctggccgtggctgtgggcgcttggcaccatgacggtcatcagcctgctggtggggctacgaccatatcgcttgttgctggcaacgcagcctttacgcgtattacgtaatgatgtggtagcgaacgtctggccgctgaagttttatctgccgattgtcagtgtggtggttgtgctgctgctcgccggattaatgggtggcagcatgctgctttgggcggtgctggcgggcgcggtagtactggctttgctgtgcggtgtgctgggctggatgctgctgaatgtacttcgccgcatgacgctgaaaagcctgcctctgcgcctggcggttagccgcctgttacgtcagccgtggagtacgttaagtcagcttagcgcatttagcctctcctttatgctgctggcactgctgctggtgttgcgtggcgatctgctcgaccgctggcagcagcagctacctccagaaagcccgaactactttttaattaacatcgccacagaacaggtagcaccgctaaaagcgttcctcgcggaacatcagatagtcccggaaagcttttatccggtggtgcgggcgcggctgacggcgattaacgataagccgacagaaggtaatgaagatgaggcgcttaaccgcgaactcaatcttacctggcaaaatacgcggcccgatcataatccgattgtcgccggtaactggccgccaaaagccgatgaagtgagcatggaagaggggctggcgaaacgcttaaacgttgccctcggtgataccgtgacttttatgggcgatacccaggagttccgcgctaaagtgaccagcctgcgcaaagtggactgggaaagtctgcggcctaatttctattttattttccctgaaggggcattagacgggcaaccgcagagctggcttaccagtttccgctgggagaatggcaacggcatgttgacacaactcaaccgccagttcccgaccattagcctgttagatattggcgcgattttaaaacaggtcggtcaggtgctggagcaggtaagtcgggcgctggaagtgatggtggtactggtcaccgcctgcggtatgttgctgttgctggcacaggtgcaggtgggaatgcgtcagcgtcatcaggagctggtggtgtggcgcacactcggtgcggggaaaaaactgctgcgtaccacgttgtggtgtgagttcgccatgcttgggtttgtttccggcctggtggccgcaattggtgcggaaacggcgctggcagtgttgcaggcgaaagtgtttgattttccgtgggagccagactggcgattgtggattgttctgccgtgcagcggagcgctgctgctgagccttttcggcggctggctgggtgcgcgactggttaagggtaaggcgctgttcaggcagtttgcggggtgatgagagtccctcattaccgcgccttaacccattccgccacttccgcccactcaccgcgaaagacaactttttccgcttttttctcaagctgatagcgatacatcgggtcgtaatattcttcaagtaacggcaccagccaggccagatgaccgtcggtgctgccggtggtgagttgcgttgtcagtgctgcatccagccttgcagccagttcgttatagcgctgtagccccagccgacgcttaatcgcgctaagtccgtgatgcaggtattcgcaatactcctgccagccctgttcgtcgccgtacgcgtgggtaaaatcatgatgcatacgcaagaaatactcttcgttcaggcgctcaagacggatctcaaacggatcttctaccaccgcaatcgccgcctgagtcattcgctcgcgcaggcattccggcaggtgattgctaccgatcatccggctttcgtcttccagcacccacaggcgcaaattctgacgggcgtcggtttttagcatttcggcagccagcaggttttcaaaactcgcctggctaagttgtggttgtaacgtgcgaccaaacgcgctaccgcgatgacgcgccaacccttccagatcaacaccgttcggctgttgctgcactaacagcgttttaccgctgccggtacaaccgccaatcagcactatcggtttttgtgccagttcaatagtcgcctgaatcgcggtctggcgcagtgccttataaccgccttccaccagcggataatcaatccccgctgcatgcaaccagctttgcacaatatgactgcgctgaccgccacgggcgcagcagagaataccttgcggattttgcaggcacgctgcccgccaggcgtccatgcgctgctgacgaatttcacccgccaccagtttatgtcccagcgccagcgctgcgtcactgccttgctgtttatagcaggtgccaacggcggcgcgttcatcgttattcattaacggcagattgatagcggcgggcattgcgccgtgctcaaactcgataggggcgcgaacatcaataatgggcgtatcagcaatcagcagggcacgatagtcctgttccgtgtgtctctcttgcatagttaaaagtgaacctcaaatcagcttgcgcgctattttacgcgccaacgcgcaaggaaacttgatttttaactgcgtgggttgccgaaaatttctaaaaatccgctgatttccggcctgcgctgggtaaacaaggtcacaatatcttctaccgctttgccgctgccaaatttgcgccatgccagactcaatgggctaggagggcgcatcgttgggattacccggctgaccagttgttgattatcgatcatactctggcaaaggctttttggcaaaaaaccaatgccaacgcccgccagatgggcggcgattttcgtttccatatcgggaacaataatctctttttgccctggcaatcgccaggcgacgcgtttggttaaggtgcgggcgctgtcttcaatattgaccgccggaaagcgccgcaactgcgcttctgttagcggctcttcaacgttcgccagcggatgatccgccgccatgacaaagcgccattgcacgcttcctaagggatcaagactaaaggtatttgccagcgcctcagttcccgtgacgccgatagccaggctaaaaccttcgtacaataggctgtcccagacgcccatatagatttgtcgggagatgtgaaactgggtaaaggggtaacgctcattcagccacgccagcaactgggcgacggcctgggggttgtagagcaggttgttgatgacaatattcacctggcgttccacgccatcattcacctgttgcagctcgcttggcatactttccagccagctcagccagtctctggcctgggaaagtagatgctcgccagccgctgtcaacgtcacgctgcgagtcgtacggaaaaacagcgctactccggtattctcttccagaagtttaatgcgataactgatcgtcgccgtggttttacataatcgttctgccgctttactaaaacttcctgtttcagcaaccgcaatgaaagtccgcaaggtttctggatcgaacatcttcaggtatccccttttaaatccgcaagttgcgtgattttcttatcctctgatttatcagtatttttacatgataaccctgttcaatttgtggactaaatctagttttggaaaaatattccaacttttgtattgatgttgttctcttaaggttttagattgcctgttattgaaaccaagctgaccggtcggcggtggttgaacggaattatgttacaaggacaaaaagatgaaacttcaggtattaccgttaagtcaggaagcctttagtgcttatggcgacgtaatcgaaacgcagcaacgggattttttccatattaacaatggcctggtggagcgttaccacgatttggcgctggttgagattcttgagcaagactgtacgcttatcagcattaaccgcgcgcaaccggcgaatctgccgctgaccattcacgaactcgaacgtcatccgctgggtactcaggcctttatcccgatgaaaggtgaggtgtttgtggtggtcgtggcgttaggtgacgacaaaccagacctgagtacgctgcgggcgtttatcaccaacggcgaacagggagtgaattaccatcgtaacgtctggcatcacccacttttcgcctggcagcgcgtcaccgattttctgaccatcgatcgcggcggcagtgacaactgtgatgttgaaagtattcctgaacaggaactctgttttgcgtgacgcctgcaaccgacttgcataagataaactaattgttcattgtttatgctcacttgtaggtcggagttaacgtaggtatgacggaagttagacggcgcggcaggccaggacaggcggagcctgtggcacagaagggcgcacaggcgttagagcggggaattgcgattctgcaatatttggaaaaaagtgggggaagtagcagcgttagcgatatttctctcaatctggatttgccgctctccacgacctttcgcttgctgaaggttttacaggcagcggattttgtctatcaggacagtcaattaggctggtggcatataggattaggtgtctttaacgtcggtgcggcgtacatccataaccgcgatgtcctctccgtcgccgggccgtttatgcgccgcctgatgttactttccggcgaaacggtcaatgtcgcgatccgtaacggcaatgaagcggtattaattggtcagttagagtgtaaaagcatggtcaggatgtgtgcgccactgggcagtcgtctgccactgcatgcttccggtgcgggcaaagcgctgctttatccgctggcggaagaggagttgatgagcatcattctgcaaaccggtttgcagcagtttacgccaactacgcttgtggatatgcccaccttgctgaaggacctggaacaagcgcgtgaactgggctataccgtagataaagaagagcatgttgtaggtctgaattgcatagctagtgcaatttacgatgatgtcggtagtgttgttgccgctatctccatctccgggcctagtagtagactgacagaagatcgttttgtcagtcagggtgagctggtcagagacaccgcccgcgatatcagcacggcgttgggactgaaagcacatccataatgtctgtcgcatcccgctctgcggagcgggtttttttgacaaaatttgaaagttggaaaaattttccaataaatagaggtaggaataaaatggcaaaaatgagagccgttgacgcggcaatgtatgtgctggagaaagaaggtatcactaccgccttcggtgttccgggagctgcaatcaatccgttctacagtgcgatgcgtaagcacggcggtattcgtcacattctggcgcgtcatgtggaaggtgctagccacatggcggaaggttatacccgcgcaacggcagggaatatcggcgtatgtctggggacttccggtcctgcgggcacggacatgatcaccgcgctctattccgcttctgctgattccattcctattctgtgcattaccggccaggcaccgcgcgcccgtctgcataaagaagattttcaggccgtagatattgaagcaattgctaaaccggtcagcaaaatggcggttacagttcgtgaagcggcgctggtgcctcgcgtgctgcaacaggcatttcacctgatgcgttctggtcgtccgggtccggtactggtggatttaccgttcgacgttcaggttgcggaaatcgagtttgatcctgacatgtacgaaccgctgccggtctacaaacctgctgccagccgtatgcagatcgaaaaagctgtagaaatgttaatccaggccgaacgtccggtgattgttgccgggggcggggtaattaatgctgacgcagctgcactgttacaacagtttgctgaactgaccagcgttccggtgatcccaacgctaatgggctggggctgtatcccggacgatcatgaactgatggccgggatggtgggtctgcaaaccgcgcatcgttacggtaacgcaacgctgctggcgtctgacatggtgtttggtatcggtaaccgttttgctaaccgtcataccggcagcgtagagaaatacaccgaagggcgcaaaatcgttcatattgatattgagccgacgcaaattggtcgcgtgctgtgtccggatctcggtattgtctctgatgctaaagcggcgctgacactgctggttgaagtggcgcaggagatgcaaaaagcgggtcgtctgccgtgtcgtaaagaatgggtcgccgactgccagcagcgtaaacgcactttgctgcgcaaaacccacttcgacaacgtgccggtgaaaccgcagcgcgtgtatgaagagatgaacaaagcctttggtcgcgatgtttgttatgtcaccaccattggtctgagtcaaatcgctgcggcacaaatgctgcatgtctttaaagaccgccactggatcaactgtggtcaggctggtccgttaggctggacgattccggctgcgctaggggtttgtgccgctgatccgaaacgcaatgtggtggcgatttctggcgactttgacttccagttcctgattgaagagttagctgttggcgcgcagttcaacattccgtacatccatgtgctggtcaacaacgcttatctggggctgattcgtcagagtcaacgcgcttttgacatggactactgcgtgcaactcgctttcgagaatatcaactccagtgaagtgaatggctacggtgttgaccacgtaaaagtagcggaaggtttaggttgtaaagctattcgggtcttcaaaccggaagatattgcgccagcctttgaacaggcgaaagccttaatggcgcaatatcgggtaccggtagtcgtggaagttattctcgagcgtgtgaccaatattagcatgggcagcgaactggataacgtcatggaatttgaagatatcgccgataacgcagcggacgcaccgactgaaacctgcttcatgcactatgaataagggagataaataatgttacgtttctctgctaatttaagcatgttatttggagaatatgattttctcgcccgttttgagaaagctgcgcagtgtggttttcgcggcgttgaatttatgtttccttatgactacgacattgaagaattaaaacatgtgctggcgagtaataaactcgaacatacgctgcacaatttaccggcgggtgactgggcggcgggggagcgcggtattgcctgtattcctggccgtgaagaagagtttcgggatggcgtagcagcagcgattcgttatgcccgtgcgctgggtaataaaaaaattaactgtctggtcggtaaaacgccggctggtttcagcagtgaacagattcacgcaacgcttgtagaaaacctgcgttatgccgcgaatatgctgatgaaagaagatattttattactgattgaacctattaaccattttgatattcctggtttccatctcaccggaactcggcaggcgctgaaattgattgatgatgttggttgctgcaatttgaaaattcagtatgacatttatcatatgcagcggatggaaggtgaattaaccaacaccatgactcagtgggctgataaaattggtcacctgcaaattgccgataatccgcatcgcggcgaaccgggaaccggagaaattaattatgattatctctttaaggtaatcgaaaattctgactacaacggttgggttgggtgtgaatataaaccccaaaccaccacggaagccggtttacgctggatggatccgtaccgttaaaacgtaacgctattcagacaatgcttttttaggccgctaagttggcaggggatcgtgttgtctgaattcaggaaaagcgaaatttaaaagaggttaattatgaaactgggatttattggcttaggcattatgggtacaccgatggccattaatctggcgcgtgccggtcatcaattacatgtcacgaccattggaccggttgctgatgaattactgagtctgggtgccgtcagtgttgaaactgctcgccaggtaacggaagcaagcgacatcatttttattatggtgccggacacacctcaggttgaagaagttctgttcggtgaaaatggttgtaccaaagccagcctgaagggcaaaaccattgttgatatgagctccatttccccgattgaaactaagcgtttcgctcgtcaggtgaatgaactgggcggcgattatctcgatgcgccagtctccggcggtgaaatcggtgcgcgtgaagggacgttgagcattatggttggcggtgatgaagcggtatttgaacgtgttaaaccgctgtttgaactgctcggtaaaaatatcaccctcgtgggcggtaacggcgatggtcaaacctgcaaagtggcaaatcagattatcgtggcgctcaatattgaagcggtttctgaagccctgctatttgctagtaaagccggtgcggacccggtacgtgtgcgccaggcgctgatgggcggctttgcttccagtcgtattctggaagttcatggcgagcgtatgattaaacgcacctttaatccgggcttcaaaatcgctctgcaccagaaagatctcaacctggcactgcaaagtgcgaaagcacttgcgctgaacctgccaaacactgcgacctgccaggagttatttaatacctgtgcggcaaacggtggcagccagttggatcactctgcgttagtgcaggcgctggaattaatggctaaccataaactggcctgatacccgcaataaaaatggccgatatcagaaaatgaatcggccagcaatattaaaaaagaaagcagccaaagatgttgctagtgtattaaaaataatatttttattttatttgttcctcatagctagattaaaacaacgttatagcatacgtgaaattaagagggatttatggaacatcagagaaaactattccagcaacgcggctatagcgaagatctattgccgaaaacgcaaagccagcggacctggaaaacatttaactattttaccttatggatgggtagcgttcataacgttcccaattatgtgatggtcggcggcttttttattctcggcttgtctacctttagtattatgctggcaattatcctcagcgcctttttcattgccgcggtaatggtattaaacggtgctgcgggcagtaaatacggtgtgccttttgccatgatcctgcgtgcttcttacggtgtacgtggtgcactgtttcccggattattaaggggcggaattgccgccatcatgtggtttggtttgcaatgttacgcggggagtctggcctgcttgattctgattggcaaaatctggccgggatttttaactctcggtggtgatttcactctgttaggcctttctctaccgggcttaattactttcttaatcttctggctggtcaacgttggtataggttttggcggtggcaaagttttaaataaattcactgccattcttaacccgtgcatctatatcgttttcggcggtatggcgatttgggcgattagtctggtcgggatcggtccaatctttgactacattccgagcggtattcagaaagcagaaaacggtggcttcctgttcctggtggtgattaacgcggtagttgcggtctgggcggcaccggcggtgagcgcatccgactttacgcaaaacgcccacagctttcgtgagcaggcgctggggcaaacgctgggtttagttgtggcctatattctgtttgcggtcgccggggtatgtattattgccggagccagtattcactacggcgctgatacctggaacgtgctggatattgttcagcgttgggacagcctgttcgccagcttctttgcggtactggttattctgatgacaactatctccactaacgcgaccggtaatattattccagccggttatcagattgccgccattgcaccgacaaaactgacctataaaaacggcgtactgattgccagtattatcagcttgctgatctgcccgtggaaattaatggaaaatcaggacagcatttatcttttcctcgatattatcggcggaatgcttggtccggtaattggtgtcatgatggcgcattattttgtggtgatgcgcggacaaattaatcttgatgaactgtataccgcacctggcgattataaatattacgataacggttttaacctcactgcgtttagtgtaactctggtggccgttattttatctcttggcggtaagtttattcactttatggaaccgttaagccgtgttagttggtttgtcggcgtcatcgtcgcctttgcggcctacgccttattaaagaaacgtacaacagcagaaaaaacaggagagcaaaaaaccataggttaattaatcccgatattgaacattgagttaaaaaccaatctgtattttacaaggagtttgttatgtcttttgatttaatcattaaaaacggcaccgttattttagaaaacgaagctcgcgttgtagatatcgccgttaaaggcggaaaaattgctgctatcggtcaggatctgggcgatgcaaaagaagttatggatgcgtctggtctggtggttagcccgggcatggttgatgcgcacacccatatttctgaaccgggtcgtagccactgggaaggttatgaaaccggtactcgcgcagcggcaaaaggtggtatcaccaccatgatcgaaatgccgctcaaccagctgcctgcaacggttgaccgcgctagtattgaactgaagttcgatgccgctaaaggcaagctgactattgatgcggcacaactcggtggcctggtgtcttacaacatcgaccgtctgcatgagctggatgaagtgggcgttgtcggcttcaaatgcttcgttgcgacctgtggcgatcgcggtatcgacaacgacttccgtgatgtaaacgactggcagttcttcaaaggtgcgcagaagctgggcgaactgggtcagccggtgctggtgcactgcgaaaacgcgctgatttgtgacgaactgggcgaagaagcgaagcgtgaaggtcgcgtaaccgctcatgactatgtggctagccgtccggtatttaccgaagtggaagcaattcgccgcgtactgtatctggcgaaagttgctggttgccgtctgcacgtttgccacgtcagcagcccggaaggtgttgaggaagtgactcgtgcacgtcaggaaggtcaggacgttacttgtgaatcctgcccgcattactttgtactggataccgatcagttcgaagaaatcggtactctggcgaagtgtagtccgccgatccgcgatctggaaaaccagaaaggcatgtgggaaaaactgtttaacggtgaaatcgactgcctggtttccgaccactctccatgcccgccggaaatgaaagccggtaacatcatgaaagcatggggcggtatcgccggtctgcaaagctgcatggacgtgatgttcgatgaagcggtacagaaacgcggtatgtctctgccaatgttcggcaaattaatggcgactaacgcagcagatattttcggtctgcagcaaaaaggccgtatcgccccaggaaaagatgccgacttcgtcttcattcagccgaatagcagctatgttcttaccaatgacgatctggaatatcgccacaaagtcagcccgtatgttggccgtaccattggcgcgcgtatcacgaaaaccatcttacgtggtgatgtgatttacgacattgaacagggcttccctgttgcgccgaaaggtcaatttatccttaaacatcagcagtaatctggcccctgcaatgcccgtccttgcggcgggcattctccggttaaggtgtgtttatgttcaattttgcagtcagccgcgaaagcctgttaagtggatttcagtggtttttctttattttttgcaacacggttgtggttcctcctacgctactttctgcttttcagttgccgcaaagtagcctgcttacgctcacgcaatatgcttttcttgctaccgcactggcctgcttcgctcaggcgttttgcggtcatcgtcgcgctattatggaagggccaggtggcctgtggtggggaaccatccttactatcacccttggtgaagcaagccgcgggacaccgatcaacgatatcgccaccagcctggcagtggggattgcactctccggcgtgctgacgatgttgattggttttagcggattaggccatcgcctggcacggttatttacgccgagcgtgatggtcttgtttatgttgatgctgggcgcgcagctgaccactatctttttcaaaggtatgctcgggctgccgtttggcatagccgacccgaattttaaaattcagttaccgccgttcgcgctcagcgtggcggtgatgtgcctggtactggcgatgattatcttcctgccgcaacgttttgcccgttatggcctgctggtcggcaccataaccggctggttgttgtggtacttttgctttccttctagccacagcctctccggtgagttgcactggcagtggttcccgctcggcagtggcggtgctttgagcccgggaattattctgacggcggtgattacaggtctggtaaatatcagcaatacctacggtgcgattcggggcacggatgttttttatccgcagcagggcgcagggaatacgcgttatcgtcgtagctttgtggcgaccggatttatgacgctgataaccgtaccgctggcggtaattccatttagtccgtttgttagttccattggtttattaacccagactggcgattacacgcggcgtagctttatttatggcagcgttatttgcctgctggtggcgctggttcctgcactcacgcgactgttttgcagtatccctttacccgtgagtagtgcggtcatgctggtttcttatctgcctttactcttttccgcgctggtgtttagccagcaaataacgtttaccgctcgcaatatttatcgactcgcattgccgttatttgtcggcatatttttaatggcattaccgcctgtgtatctgcaagaccttccattaacgcttcgtcctctgctcagtaacggcttattggtcgggattttactggctgttcttatggataaccttattccgtgggaacgcatcgaataatttgttgaaaaaggattgataatgaagattgtcattgcgccagactcttttaaagagagcttaagtgcagaaaaatgttgtcaggcaattaaagccgggtttagcaccctctttcccgatgcgaactatatctgtttgccgatagcggatggcggcgaagggacggtggatgcgatggtcgccgcgacgggcggcaacatcgtgacgcttgaagtctgcgggccgatgggcgaaaaagtgaatgctttttatggccttaccggcgacgggaaaacggcggtgattgagatggcggcagcaagtggcctgatgctggtcgcgcctgaaaagcgtaatccgttgctggcctccagttttggtacgggggagttaattcgtcatgcgctggataacgacattcgccatattattctcggcattggcggcagtgcgacggtcgacggcggtatgggcatggcgcaggcgctcggtgtgcgtttccttgatgccgacggtcaggcgctggcggcaaacggtggtaatttagcgcgcgtggcaagcattgagatggatgaatgcgatccgcgtctggcgaattgccatattgaagtagcatgtgacgttgataacccgctggtaggggcacgcggcgcggcggcggtgtttggcccgcaaaaaggggcaacgccggagatggtcgaagaacttgaacaggggctgcaaaattacgcccgtgttttacaacagcaaactgaaattaatgtctgccagatggcgggcggcggcgctgcgggcggtatgggtattgcggcggcggtatttctcaatgcggatattaaaccgggcattgaaattgtgttgaatgcggtcaatcttgcgcaggcagtgcagggcgcagcactggtgattaccggggaagggcgcatcgacagccaaacggcaggcggtaaagcgccgctgggtgtggcgagcgtggcgaagcagtttaatgtaccggtgattgggattgctggcgtattgggtgatggcgtggaagtggtgcaccagtacggcattgacgcggtattcagcattttgcctcgtctggcacctttagccgaagtgctcgccagcggtgaaaccaatctcttcaacagcgcgcgaaatattgcctgcgccattaaaataggtcagggaattaaaaactaacccttacctttaaagcggatgcgatttatatcgcataagagtgcagtactcatgccggatgcggcatgagtaccatatccttcctgaaaatcgcgcaaattctatatattgcagagatcatgtaggcctgataagcgaagcgcatcaggcaatgttacaaaaaaagccacggtataaaccgtggcaaaatccaacatagctaaaaataatcaggcgagtggtatgacttaaatctctacgtcgcggttacaatctttgctgtaaatatagctgaacgcttcaccacgccctacaccataaccagcctgtaaagaataagcgcccataaagatgtaatcgccttttttcaccgggatccagttattgtcgaggttataaaccccctgaccggaaagaatataggcaccgtgttcctgaacgtgtgtttcgatataaccgtggctggcacctggtgcaaaagagaggatatgcatgttcatatcaaaacctaactctttgggcagaaaatccagcagaataacatcgtccatgccttcataatgaatgcgttccagttcgctggcattgccagaaaccagccacggtgcatagccttctaccggaacatagcggcgcttatataaaaagatttggctgtcttcggcctgggcgttaacaaacgtcattaaggagcctggcgggcaataaagatagccaccttcgcttaaggcaaatgttttgccttcggctttggcagtgatatttccagagatcacatacaggaacgtttcaatgccttcgccaccgaagccctgttggttgccaccgttttgatgcagtgtgaccagataatcaacaaaagaggcacccagctttggcgtggagaggattgtcgcgtcacaattttcaaagcccggaataatattttttaccagaccatccggggttaacagtgcgaaattaccgtgtttaacaatcgcacggttagccagtaaatcttcgcggtaaccggtgacgttatttaaatatcccatttatgactccttatttctgccaggcaagttgataaagcatgagtgccaacgttttgaccccttcggcaaggtcggtaatattggtgcgttccgccgggttatggctgatcccgttgatgctggggataaaaatcatgcaggttggtacgcgaggcgcgaaaatttgcgcgtcgtgcccggcaccactgtgcatcacccggtaattcagtttttctctttcacacaattctgtcagggtggcgaccagctccttattcatcggcacgggttcttcgtccatccataaatcgatatcaataccaatgtccatttcatcgcaaatcgcccgcatgtcgttttctaactgttgggtgaaatcgcgcagcacggcagcgtcggtatgacgacaatcaatggtgaacgtggttttacccggcaccacatttaccgtattcgggcgcggctctactttgccaaaggtcagaaccagcggatcgcccatccttttcgctttttcgacgctctgatggcaaatgcgactgaaagcgtaaactgtatcacgacgataacccatcggcgtggtgcctgcatggttactttcgccgttcagcgttaccgtataacgacgctgcccgacaattgcattcaccacgccaatactttgcccattactttccagcacacagccctgttcaatatgcagttcaacaaaggctttaatatcctgacgcggagttagtggggcgttcggaagagtaaatccgcaagccttcatcgcatcgacaaaactatttcctttggcatcacagatattccgcacgtcgtcaggattcgccagcccaaaaatatttttactgccccagaagacatacgggaagcggctgccttcttcttctgccatcgccaccacttcgaccgtacgtagcggcgcgccgtattgcgttttcagccagtcaattgccagccacgccgccagcgcgccgaattgcccgtcaaggttaccgccgttaaccacggtatcgatatggctaccgctcagaaccacttcctgtggatattcggtgccattcaggcgaccgtataaattccccacttcatcgaaacgtgtttccagcccgcttgctgccattctttttttaaattgctgctgggtttccagccattccgggctataaagtaaacgggtcatcccacccgctgggtcagcgccaaaagaggaaagccagggcagcgtttcttctatagcttgacggaaatgtgtaatcataagaaagtcctgtctcaataattattgcgcaaagggatttttcgtttcgtaactcgtgttataaagcgcgtcggaaattaaatactggtaaatatcatcaacaatttcgatgccttcgacggcggctttgcgttgtttaatatcctgatcctgtccgggataataaacctgattaaaaccgggcgcgggggtaatggcatttaattcgcgcatggtctggctaagatgttgacggaataattcgctggaggagaaaaagttcggattaataactatatgtaattgccccaaattacgccctgcgtgtaaatcgtcatacatgctactaacctgtcgcccgaacggtaagccgagtaagacgccactgaggacgtcaatcatcatcatcaggccatacccttttggcccggcggcggggagcagagcatgtaccgcgaacggatcggttgttggtacaccgtttttatcgaccgcccaggtatccgggatagacatattacggctgcgggcgtcgagcacttttccccatgcctgtacggtagtcgccatatcaaaggtaaggatctcgtcgccttctcccggcgcggcaaaggccagggggttagtaccgtagtaaatttccgcgccgccaaacggcaccaccattggatcggactggcacatgctaatgccaatgaatccggcgcgggctgcctgctgcacaaaataagagattgcgccgctgtgacccatccggctgataccgaccaccgcaacgccattttgctgggcggttttgatggcatgttccatacccattttcgccgcgacctgtccggcggcattgtcggcatgtaaaattgcgctgcacggcccggtttcctcaagacgaaactccggttcgcggttggtgccgcctttactaatgcgttccgcgtagtattccacgcgcaccgcgccatgagagtggatccctctggcatcggcgtaaaccaatacttcagccacggttgcagcgtgctcacgttttaacccagcctggcagagtttattctcaattagctggtggagtgtttcccgactgattttcatctgtcttcctttttaacgacggtgtgaagcatgactgcaattaacatacagggaaaatatctggattatgtgatccagacaggcaaaaaaatatagttagaatttatttgataatccgctcacttttaacctgatttttaaaacaacaacgcttattaaaaaataatgagtaatagcctggtggttatttgaattcttttgttaataattcctgtgtgatattcatcaccttatttactcgttgtcatcgataccgtaatcgccacattaacactgctcgtgcaattgccatgggtgcaatttttaaggagttgttatgatccacgcctttattaaaaaagggtgttttcaggatagcgtcagtttaatgattattagtcgaaaactcagcgaaagtgaaaatgttgatgatgtttccgtaatgatgggtacgcccgccaataaagcgttattagataccacaggtttctggcatgacgattttaataacgccacgccgaacgatatttgcgtggcaattcgtagcgaagcggcggatgcggggatcgcgcaggcgattatgcagcagcttgaagaggcgctaaaacaactggcgcaggggagtggcagcagccaggcgttgacgcaggtgcgtcgctgggacagtgcctgtcagaaattacccgatgccaatctggcgctgattagtgtggctggcgagtatgcggcggagctggcaaaccaggcgctggatcgcaacctcaacgtgatgatgttctccgataacgtcacgctggaagatgaaatccaacttaaaacccgcgcgcgggaaaaaggcttgctggtgatggggccggactgcggtacgagcatgattgccggcacaccgctggcttttgctaacgtgatgccggaaggcaatattggcgtcattggcgcttccggtaccgggattcaggagctgtgtagccagattgcgctggcaggggagggaattactcacgcgattggccttggcgggcgcgacctcagccgtgaagtgggcggcatcagtgcgctaacagcgctggaaatgctcagtgcagacgagaaaagcgaagtgctggcatttgttagtaaaccacctgccgaagctgtgcgtctgaaaattgttaatgccatgaaagcaaccggcaaaccgacggtggcgctgtttttaggttataccccggcggtggcccgcgacgagaatgtctggtttgcctccagcctggatgaggccgcacgcctggcttgcctgcttagtcgcgtcacggcgcgacgtaacgcaatagcgcctgtcagcagcggatttatttgcggtttgtataccggcggtacgctggctgccgaagcggcgggattacttgccggacaccttggcgtggaagccgacgatacccatcaacatggcatgatgctggacgccgatagccaccagattattgacctcggcgatgatttctacaccgtcgggcgtccccatccgatgatcgacccaaccttacgcaaccagttaattgccgatctcggcgctaaaccgcaagtgcgcgtgttgctgcttgatgtcgtgattggcttcggtgcgaccgccgatcctgccgccagcctggtgagcgcctggcaaaaagcctgtgccgcgcgtttagataatcaaccactgtatgccattgccacggtgacaggcactgaacgtgacccgcaatgccgcagccagcaaatcgccacgctggaagatgcggggattgcggtcgtgagtagcctaccggaagccaccttgctggcggcagcgttaattcatccgctcagccctgccgcacagcaacacacaccgagtttactggaaaacgtcgccgtgattaacatcggattacgcagctttgcgctggagctacaaagcgccagcaaaccggttgtgcattaccaatggagcccagtcgccggtggcaataaaaaactggctcgtttattagaacgtttgcaataaggggttcccatgtttacatcagtggcgcaagccaatgctgcggttatcgaacaaattcgtcgcgctcgtccacactggctggatgtgcaaccggcttcttcacttatcagcgaactaaacgagggcaaaacactgcttcacgccgggccgccaatgcgctggcaggagatgaccggacccatgaaaggggcgtgcgtgggcgcatgtctgttcgaaggttgggcgaaagatgaagcgcaggcgctggcaatactggagcagggggaagtgaacttcattccttgtcaccatgtgaatgccgtcgggccaatgggcggtattacttctgccagtatgccgatgctggtggttgagaacgtgaccgacggcaaccgggcgtactgcaacctcaacgaaggtatcggcaaagtgatgcgttttggcgcttacggcgaagatgtcctgactcgccatcgctggatgcgcgatgtgttaatgccagtattaagcgcggcgctggggcgcatggagcgcggtatcgatctcacggcgatgatggcgcagggcattacgatgggcgatgagttccatcaacgcaatattgcttcctctgcactgttaatgcgtgcgctggccccacaaattgctcgcctcgatcatgataaacagcacatcgccgaagtgatggatttcctcagcgtgaccgatcagttcttcctcaacctcgcgatggcttactgcaaggcggcgatggatgctggcgcgatgatccgcgcaggcagcatcgtcacggcaatgacccgcaacggcaatatgttcgggattcgggtaagcgggctgggcgaacgctggtttactgcgcctgtaaacactccgcaaggtctgtttttcaccggcttctcgcaggagcaggcgaacccggatatgggcgatagcgcgattaccgaaacctttggtatcggaggtgcggcaatgatcgcagcgcctggcgtaacgcgctttgtcggtgcgggtggcatggaagcggcaagagcggtatctgaagagatggcggaaatttaccttgaacgcaatatgcagttgcagatcccaagctgggattttcagggcgcgtgcctggggctggacattcgtcgcgtggtagaaaccggcattacgccactcatcaataccggtatcgcccataaagaggcggggatcgggcagattggcgcaggcaccgtgcgggcaccgctggcgtgctttgaacaggcgctggaagcactggctgaaagcatgggtattggttgaggaacgcgcaatgacgatcatccatcctctgcttgccagtagtagcgcaccgaattatcgccagtcctggcggttagcgggagtgtggcggcgggcgattaacctgatgacggaaagcggcgaactgttaacgttgcatcgtcagggtagtggtttcggccccggaggatgggtgcttcgccgtgcgcaattcgatgcgttatgcggtggattatgcggcaatgaacgaccacaggttgtggctcaagggattcgcctcgggcgtttcacggttaaacagccacagcgttattgtttgctgcgtattacgccgcctgcgcatcctcaaccacttgcagctgcatggatgcaacgcgcggaggaaaccgggcttttcgggccactggcgttggcggcaagcgatccgctgcctgctgagttacgccagtttcgtcactgttttcaggccgcgctcaatggcgttaagaccgactggcggcactggctgggtaaaggccccggattaacgccgagtcatgatgacacgctgagcggaatgctgctggcggcctggtattatggcgctttagatgcgcgctccggtcgtccgttttttgcctgttccgacaatctgcaactcgttaccacagcggtgagcgtcagttatttacgttatgccgcgcaaggatatttcgccagcccactcctgcactttgttcatgctctgagttgcccgaaacgtaccgctgttgcgattgatagcctgctggcgctggggcatacgagtggggcagatacgctgctggggttctggcttggccaacaattattacaaggaaaaccatgaaaacactggttgtggctcttgggggcaacgccttactccagcgcggtgaggcgctgacggcagaaaatcaatatcgcaatatcgccagtgctgtacccgcgctggcacgcctggcccgttcttatcggttggcgattgttcacggcaacgggccgcaggtggggctgctggcattgcagaatctggcgtggaaagaggtagaaccgtatccgctggatgtgctggttgcggaaagccaggggatgattggctatatgctggcgcagagtttgagcgcacagccgcagatgccgcccgtgacgacggtgctgacgcgcattgaggttagccctgatgatccggcgtttttgcagccagagaaatttattggtccggtttatcagccagaagaacaagaggcactggaagcggcttacggctggcagatgaaacgtgatggtaaatatttgcgccgggtggtggcgtctccgcaaccgcgtaaaattctcgacagcgaagccatcgagttgttgctcaaagaggggcatgtggtgatttgcagtggcggcggcggtgtgcctgtgacggatgacggagcagggagtgaagcagtgattgataaagatctcgccgctgcgttgctcgccgagcagattaatgcagatggactggtgatcctcaccgatgctgatgcggtatatgaaaactggggaacgccgcagcaacgtgccattcgccatgccacaccggatgagttagcgccatttgccaaagccgatggtagcatggggccgaatgtaacggcggtgagtggttatgtcagaagccgtggtaaacccgcgtggattggggcgttaagccgaattgaagagacgctggcgggcgaagcggggacctgtattagcctgtaatcgtaggcattagacatttgtgcctgatgcgacgcttgacgcgtcttatcaggcctacaaccggtgccgcatccggcaattggtgcacaatgcctgatgcgatgcttgacgcatcttatcaggcctacaatgggtaccggatcggtaggccggataaggcgtttacgccgcatccggcaagaatagagcaccagttaaccgaacttactctgcgcccaaatcacgccgctggcatattccggcggcagcagcgggattaaggcttccagcgtcgcagtcagacggcttgtgtcgctgtcggtcaaattcagatgccccactttacgccccggacggacttctttgtcgtaccagtgcagatgcaccagcggcagtttcagccagtcataattcacatcgctaccaatcagattgatcatcacgctcggattattcaccactggttgcggtaacggcagatcggtaatcgcccgcagatgcagctcaaactggctgatgctggcaccgttttgtgtccagtgaccgctgttatgcacacgcggtgccagttcgttgatcaacagaccttgcggggtgacaaaacactccatcgccatcacgcccacatagcccagctcctgcataatcgcgctcagcatctcttcggcttgcgcctgctgctgtgcgttggcctgcggaaaagcgacgctggtgcgcaaaataccgtcctgatgcaggttatgcgtcagcggataaaacacggtgctgccatcaaagccgcgcgcgccaaccaggctcacttcaccagagaagttaatgccctgctcgacaatacattcgccgtaacactctgccggtaactgttcggtttcatttgcgcgtaaacgccattgaccgcgaccgtcataaccaccagtgcgacgcttaacaatcgccagctcacctaaacgatcaaacaccgcaggccactcgctgcgttcggcaagtaactgccacggtgcagtcggcaggtggagcttatcgaaaagctgcttctgagtcagacggtcagcaataatcgggaacacatcgcggttcacaaaggccggatggcgcgccagctcgcgggttaatgcggtttccggccagcgttctatctcagcggtaatcacgctttgttgaaaaggcaccgccgccggttcagcgtccagcccgactggccagacagcaatgcctaacggttcgcctgcctgacgcagcatacggcctaactgcccgttaccgaggacgcaaacctgtttcatgccgcacctcgcgggtccgggttttccagcacttcgtcggtctgggctttgcgccagtcattcagacgctggtgcagttctttatcatgagtcgcaagaatttgtgctgccagtaacgccgcgtttgccgcgccagctttaccaatcgccagcgtacccaccggaatgccgcgcggcatttgtacgatggagtagaggctatcgacaccgctcagtgcggcgctctgtactggcacgcccagcaccggcaccagcgttttggcggcaatcatgcctggcagatgcgctgcgccgcctgcgcccgcaataatcacctgataaccgttctcttcggcgctttcggcgaagctgaacagtttatcgggggtgcggtgagcagaaaccacttcaacgtggtgcgggacattcaggatttcgaagatttcggcggcgaactgcatggtagcccagtcgcttttggaccccatcacgatggcgacacgcgccggattattgcgggaagacatgcgtcttaaaactcctgtggtgcacaactctcggctttagagggcacagagaatagcacggaaagagagcaaggaaaacggttgcgtggctgtgaaatcagcaaagttgcgggttttttaaaacggaaaatgaatcagctcaacgtcatccgccgtgactttcaccatactaccttccgtatgccaggcacccagtaccacgcgaaaagcaggttgctgattggcgataagttcatgcaccgccgggcgatgggtatgcccgtggatcagccattgcacctgatgtttttccatcgcactgaccaccgcgttttggttaacgtccatgatcgccaggcttttactgctgttggcttctttgctgttcgcgcgcattcgcgcggcaatgcgtttgcgcacaaacaacggcagggcgaggaatagcgtctgcagccagggtttgtggaccttggcgcgaaaagcctgataacccgcgtcatcggtgcacagcgtgtcgccatgcataatcaacacccggcgaccataaagttcgagcaccttttcttccggcaataacgtcatgccactttcacgggcaaagcgtttgccgagcagaaaatcacggttgccatgaatgaaataacagggaacgccggaatcggacaccgctttgatcgccgccgccatcttgcgatggagtgggttgggatcgtcgtcgccaatccatgcttcaaacagatcgccaagaatatacagcgcgtcggccttgcgggcttcccccgctaaaaaacgcagaaaaccggcggtgatcgccggttcttccacgcagagatgaagatctgcaataaagagtgtcgccacgattactcgctaacggtcacgctttcaatgataacgtcttcttttggcacgtcctggtgcataccgctacgaccggttgcaacacctttgattttgtctaccacgtccatgccgtcaaccacttcagcaaacacgcagtagccccaaccttgcaggctttcgccagagaagttcaggaagtcgttatcaaccacgttgatgaagaactgtgcagttgcagagtgcggagcctgagtacgtgccattgccagcgtaccacgggtatttttcaggccgttgttggcttcgtttttgatcggttctttggtggctttttgtttcatgcccggttcaaaaccgccgccctgaatcataaagccgttgataacacggtggaaaatggtgttgttgtaaaaaccttcgcggcagtagtccaggaagtttttaactgtttcaggtgctttatcgtcaaaagttttgatgacaatatcgccgtgattggtgtggaaagtaaccatttttgcatcctgttccgtttgattggtgcttcaacccagttcgggtcatatatagggtggtgttatagcataaccgcacgatcggatcatcacgcaatgtatgctgattcgcgcgggaaatatgggtattatacgcaactcaattacccacacatgtctaaacggaatcttcgatgctaaaaatcttcaatactctgacacgccaaaaagaggaatttaagcctattcacgccggggaagtcggcatgtacgtgtgtggaatcaccgtttacgatctctgtcatatcggtcacgggcgtacctttgttgcttttgacgtggttgcgcgctatctgcgtttcctcggctataaactgaagtatgtgcgcaacattaccgatatcgacgacaaaatcatcaaacgcgccaatgaaaatggcgaaagctttgtggcgatggtggatcgcatgatcgccgaaatgcacaaagattttgatgctttgaacattctgcgcccggatatggagccgcgcgcgacgcaccatatcgcagaaattattgaactcactgaacaactgatcgccaaaggtcacgcttatgtggcggacaacggcgacgtgatgttcgacgtcccgaccgatccaacttatggcgtgctgagccgtcaggatctcgaccagctgcaggcaggcgcgcgcgttgacgtggtcgacgacaaacgcaacccaatggacttcgttctgtggaagatgagcaaagagggcgaaccgagctggccgtctccgtggggcgcgggtcgtcctggctggcacattgaatgtagcgcaatgaactgcaagcagctgggtaaccactttgatatccacggcggcggtagtgacctgatgttcccgcaccacgaaaacgaaatcgcgcagtccacctgtgcccatgatggtcagtatgtgaactactggatgcacagcgggatggtgatggttgaccgcgagaagatgtccaaaagcctgggtaacttctttaccgtgcgcgatgtgctgaaatactacgacgcggaaaccgtgcgttacttcctgatgagcggccactatcgcagccagttgaactacagcgaagagaacctgaagcaggcgcgtgcggcgctggagcgtctctacactgcgctgcgcggcacagataaaaccgttgcgcctgccggtggcgaagcgtttgaagcgcgctttattgaagcgatggacgacgatttcaacaccccggaagcctattccgtactgtttgatatggcgcgtgaagtaaaccgtctgaaagcagaagatatggcagcggcgaatgcaatggcatctcacctgcgtaaactttccgctgtattgggcctgctggagcaagaaccggaagcgttcctgcaaagcggcgcgcaggcagacgacagcgaagtggctgagattgaagcgttaattcaacagcgtctggatgcccgtaaagcgaaagactgggcggcggcggatgcggcgcgtgatcgtcttaacgagatggggatcgtgctggaagatggcccgcaagggaccacctggcgtcgtaagtaattgcgctattgccggatgcgagttttcgcatccggttatcgtctgcgccaccacaacattcccatcagtagcatccccggcaaccacacccacatcaattcagaaataatcacctgatgcccgtacggcgtggtgtaacgagacaatgcaaacggcgcgacttttatcacctgccagggagcgaaaaagcgttcatcactccacggccacagccagccaacgcctttaccgccagtggttacgctatccagcaagctgtggcttagcaagctgacggttaaaaacagccagcagcgaatcagcccagccctgaaccatcggcgtccaataaacacacataacagcgggacaacaaacgcaaacaccaggctatgggtaaacccgcgatgaccaaaaacattgccgtaagcaacgccaaatttaaagctcaatacgtcggcgtcgggcagcatcgccaggatgattccggcaaataacagacgcggagggatgactttgctacccaaccctaaaccaatgcataggggaacggcggcgtgcgtaataacggttggcatgatggtcgcttcggcaaaatgtcgatgctatcagcatggatgaacggggcgtagagggcaaaagtctgaaaagagaaccggcctgttgatacaggccgggaaagggatcaggcaacaacctgtacgctgtgacctgcaaaactcactgtctgaccggcgacgattttgcagcgtttgcgcgtttcaaccgcaccgtcgactttcacctggccttcggcaatcgcgattttcgcctgcgcgccgctttcgctccagccttccagtttcagcaagtcgcacagctcaacgtgcggatgtttacctaaagaaaatgtcgccatgttactcatcctgtggatcatgatattcaacgcacgcctgtagcgtgttttcaatcagcgtggcaaccgtcatcgggccaacgccgccgggaacaggcgtaatgtaactggcgcgtttagccgcgtcttcaaacacgacgtcgcccacaactttgccattttccagacggttgatgccgacatcaatcacaattgcgccttctttgatccagtcaccgggaataaagcctggcttgccaacggcaacgatcaatagatcggcattttctacgtgatgacgcagatttttagtgaagcggtgagtcactgtagtggtgcaacctgccagcagcagttccatgctcatcgggcggccaacgatattgcttgcgccaatcaccacggcgttgaggccgaaggtatcaatgttgtaacgctcaagcagcgtgacgataccgcgcggggtgcagggacgcagacgcggcgcgcgctggcacagacgaccgacgttgtaaggatggaaaccgtccacgtctttgtccggatgaatacgttccagcactttgacgttatcaatacccgccggtaacggcagttgaaccagaatgccatcgatggtgttgtcggcattcagcgtatcgataagctccagcagctccgcttcgctggtggtttccgggaggtcataagagcgggagacgaacccgacttcttcacaagccttgcgtttgcttgcgacataaatttggcttgcagggttactacccaccagcacaacggccagtcctggtgcccgcagtccggctgcaatacgcgcctgaactttttgagcaacttcagagcgcacctgctgcgcaatcgttttaccgtcaataatctttgctgccatcagagagaggattccatctgttacgtagatcgaaggggatgcgcctattttgtcagaagcggggcgcgctgtcaggtttcgtttcagatttatcgcgtgaagcgacctcttgcgaaggtgaggcgcaccgtcgctgagactgaaagcttcatttttcgtccatgatggcgttgtaaatctggaactgatttatttccttgtctaaggattaagataatttaagaaatacctgacaatataaaaagaattttcagcctggtaatttaccgcttcaggtctatatttgtgttgaatatattttgcgcggaagtattcatctaacggggctctctattttttagaatagagtgcatattttcaattaagacattcttagaggataaaaaggaatttactactatcagtgtcttaaataaagtaatcggttatatacggatgtggagtcgataaatgagattgaaggaatatatatgaaattaagatttattagctctgcgctggctgccgcactattcgccgctacgggtagttatgctgccgttgtagatggcggtacaattcactttgaaggcgaactggtgaatgctgcctgtagtgtgaatactgacagcgcagaccaggttgtcacactcggtcaatatcgtaccgatattttcaatgctgttggtaatacctctgcattaattccattcaccattcagttgaacgactgcgatcctgttgttgccgctaatgctgccgttgcattttctggtcaggctgatgcaatcaatgataatttattggccattgcatccagtaccaatacaacaacagcaacgggtgtcggtattgaaatacttgataatacatccgcaattctcaaacctgatgggaatagcttcagtaccaaccagaacttgatccccgggaccaacgttcttcatttttctgcacgttataaaggcaccggtacaagtgcaagtgcagggcaagcaaatgctgacgcgacttttattatgagatatgaataatcaaaaccacgttgttttgaattatatatcacgtcttataacaaagtaatgtaccggttgtctgaagcggtatggtggcaatgtaaatcgaaatcatgttcactttgtatcatgccgctttattaaatgaaaagggaatgatgtgttgtaagaaaccaaagcaatcatttctttatattccttatttttgccgtcaggaatacacaaggcgtattaactatgatgactaaaataaagttattgatgctcattatattttatttaatcattagcgccagcgcccatgctgccggagggatcgcattaggtgccacgcgtattatttatcccgctgatgctaaacagactgcggtatggattagaaatagccataccaatgagcgctttctggtcaatagctggattgaaaacagcagcggtgtaaaagaaaagagtttcatcattacaccgccactgtttgttagtgaacccaaaagcgaaaatactttgcgtattatttacaccggtccaccgctggcagcagatcgtgagtctctgttctggatgaatgttaagacgatccctagcgtagataaaaatgcattgaacggcaggaatgttttgcaactggcgattttaagccgcatgaaattatttctccgtccaattcaattacaagaattacccgcagaagcgccggacacactcaagtttagccgatccggtaactatatcaatgttcataatccaagtcctttttatgtcaccctggttaacttacaagtgggcagccaaaagttggggaatgctatggctgcacccagagttaatagtcaaattcccttacccagtggagtgcagggaaagctgaaatttcagaccgttaatgattatggtagtgtaactccggtcagagaagtgaacttaaactaaccgaatcatctgacaatatcagagctaattatgaaaatacccactactacggatattccgcagaggtatacctggtgtctggccggaatttgttatagttctcttgccattttaccctcctttttaagctatgcggaaagttatttcaacccggcatttttattagagaatggcacatccgttgctgatttaagccgctttgagagaggtaatcatcaacctgcgggcgtgtatcgggtggatctctggcgtaatgatgagttcattggtagccaggatatcgtatttgaaagcacaacagaaaatacaggtgataaaagtggtgggttaatgccctgttttaaccaggtacttcttgaacgaattggccttaatagcagtgcatttcccgagttagcccagcagcaaaacaataaatgcatcaatttactgaaagctgtacctgatgccacaattaactttgattttgcagcgatgcgcctgaacatcactattcctcagatagcgttgttgagtagcgctcacggttacattccgcctgaagagtgggatgaaggtattcctgctttactcctgaattataatttcaccggtaacagaggtaatggtaacgatagctatttttttagtgagctcagcgggattaatattggcccgtggcgtttacgcaacaatggttcctggaactattttcgcggaaatggatatcatagtgaacagtggaataatattggcacctgggtacagcgcgccattattccgctgaaaagtgaactggtaatgggagacggcaatacaggaagtgatattttcgatggcgttggatttcgtggtgtacggctttattcttctgataatatgtatcctgatagccagcaagggtttgccccaacggtacgtgggattgcccgtacggcggcccagctaacgattcggcaaaatggttttattatctatcaaagctatgtttcccccggcgcttttgaaattacagatttgcacccgacatctagtaatggcgatctggacgtcaccatcgacgagcgcgatggcaatcagcagaattacacaattccgtatagtacagtgccaattttacaacgcgaagggcgtttcaaatttgacctgacggcgggcgattttcgtagcggtaatagtcagcaaagtagccctttcttttttcagggtacggcactcggcggtttaccacaggaatttactgcctacggcgggacgcaattatctgccaattacaccgcctttttattagggctggggcgcaatctcgggaactggggcgcagtgagcctggatgtaacgcatgcgcgcagtcagttagccgacgccagtcgtcatgagggggattctattcgcttcctctatgcgaaaagcatgaacaccttcggcaccaattttcagttaatgggttaccgctatagcacacaaggtttttatacccttgatgatgttgcgtatcgtcgaatggaggggtacgaatatgattacgacggtgagcatcgcgatgaaccgataatcgtgaattaccacaatttacgctttagccgtaaagaccgtttgcagttaaatgttagtcaaagtcttaatgactttggcagcctttatatttctggtacccatcaaaaatactggaatactagcgatagtgatacgtggtatcaggtggggtataccagcagctgggttggcatcagttatagcctcagttttagctggaatgaatctgtagggatccccgataacgaacgtattgtcggacttaatgttagtgtgcctttcaatgttttgaccaaacgtcgctacacccgggaaaatgcgctcgaccgcgcttatgcctcctttaacgccaaccgtaacagcaacgggcaaaatagctggctggcaggtgtaggtgggaccttactggaaggccacaacctgagttatcacgtaagccagggtgataccagcaataatgggtacacgggcagcgccacggcaaactggcaggccgcttacggtacgctggggggcgggtataactacgaccgcgatcaacatgacgttaactggcagctgtctggcggtgtggtcgggcatgaaaatggcataacgctgagccagcctttaggggataccaatgttttgattaaagcgcctggcgcaggcggtgtacgcattgaaaatcaaactggcattttaaccgactggcgcggctatgcggtgatgctgtatgccacggtttatcggtataaccgtatcgcgcttgataccaatacgatggggaattccatcgatgttgaaaaaaatattagcagcgttgtgccgacgcaaggcgcgttggttcgtgccaattttgatacccgcataggcgtgcgggcgctcattaccgttacccagggcggaaaaccggtgccgtttggaagtctggtacgggaaaacagtaccggaataaccagtatggtgggtgatgacgggcaagtttatttaagtggtgcgccattgtctggtgaattactggttcagtggggagacggcgcgaacagtcgctgcattgcgcactatgtattgccgaagcaaagcttacagcaagccgtcactgttattagcgcagtttgcacacatcctggcagttaaaggaaattatcaataagataatctgcagattattattggcgatggcatgtttgtgtctggcaaacatatcctgggctactgtttgtgcaaatagtactggcgtagcagaagatgaacactatgatctcagtaatatctttaatagcaccaataaccagccagggcagattgttgttttaccggaaaaatccggctgggtaggtgtcagtgcaatttgtccacccggtacgctggtgaattatacataccgtagttatgtcaccaactttattgttcaggaaactatcgataattataaatatatgcaattacatgattatctattaggtgcgatgagtctggttgatagtgtgatggatattcagttccccccgcaaaattatattcggatgggaacagatcctaacgttagccaaaaccttccattcggggtgatggattctcgtttaatatttcgtttaaaggttattcgtccctttattaacatggtggagatccccagacaggtgatgtttaccgtgtatgtgacaagtacgccttacgatccgttggttacacctgtttataccattagttttggtggccgggttgaagtaccgcaaaactgcgaattaaatgccgggcagattgttgaatttgattttggtgatatcggcgcaagcttatttagtgcggcagggccgggtaatcgacctgctggtgtcatgccgcaaaccaagagcattgcggtcaaatgtacgaatgttgctgcgcaggcttatttaacaatgcgtctggaagccagtgccgtttctggtcaggcgatggtgagcgacaatcaggatttaggttttattgtcgccgatcagaacgatacgccgatcacgcctaacgatctcaatagcgttattcctttccgtctggatgcagctgcggcagccaatgtcacacttcgcgcctggcctatcagtattaccggtcaaaaaccgaccgaagggccgtttagcgcgctggggtatttacgcgtcgattatcaatgaggtacggagaatgagaagagtactctttagctgtttctgcgggctactgtggagttccagtggatgggcagttgaccctttaggaacgattaatatcaatttgcacggtaacgttgttgatttctcctgtaccgtaaacacagcggatattgataagacggtagatttaggcagatggcctacgacacaactactgaacgctggcgataccacggcactcgtcccttttagcctgcggctggagggatgtcctccgggtagtgttgcgattttatttacgggaacgccggcatccgataccaacctgctggctctggatgatcccgcaatggcacaaaccgtcgccatcgaattacgtaatagcgatcgctcccggctcgcactgggggaggcgagcccgactgaggaagtagatgcaaatggcaatgtcacactaaacttttttgccaattatcgagcgttagccagcggtgttcggccaggtgtggcgaaagcggatgcgatatttatgatcaattataattaatattatattaattcgtataatttggcgtagtcgataagctctacaatactatgcaaacctagcttgccataaatattagatttatgcgcactaactgttttattgctaagtaataacttatcggcaatttctttattagataatccgctaaccagataacgtaatatggtcacttcacgattagatagcacagtgaccgtactactattcgtactacatttattgctttttatatagttaagcgtttcgctgggaaaaaacgtgtatccggagaggatcatctgaacggcatgaaaaatatcattctgatcattgcatttactgacaaaaccgttagcaccagcttgtatcgctctgccagcataaaagcattcacttttgctacttaaaaataacactttcactgtgctctggatttgtttgatccttttcaggaaggtaaaaccgtctgttccgggcaagtctatatccataatgattaaatcaacaggacgggttcggagataatcgatggttatgcgataatcatccgttttcaggacaatctgcaattcactgtttttttgcaacagaacttcaatagacattctgatgataggatgagtatccataatgatcacgctcgttggtttcatagttaccagtctcataggagcggacaattttccgttaggtcgggaaattgtactttgatacatgaaaatacgggttttcttgattcagacgcgcagcggtgtgcgtttgtttgccgctatagcgaaataaatcagaaaatcagacgcggtcgttcacttgttcagcaaccagatcaaaagccattgactcagcaagggttgaccgtataattcacgcgattacaccgcattgcggtatcaacgcgcccttagctcagttggatagagcaacgaccttctaagtcgtgggccgcaggttcgaatcctgcagggcgcgccattacaattcaatcagttacgccttctttatatcctccataatttcagagtgggacatatttgggacattatcaccaaaaatgtcgtctattttcctcgcatgctctgtcaaatgattaggcgcaaggtgagcatacctacgaaccatttctatggactcccatccgcccatttcctgaagcactgataatgggacgcctgactgaatcagccagcttgcccaggtgtgtctgaggtcatggaaacggaaatcttcctcatttatgcccgtcttatccgtttccgctttgcccttcaccacatcactttttgtcgctgtttggcgagataattcaacggtgtcaggccgtaaaacgccttaaaaacagagataaagtagctcgtgctgctatagccacataattgcgccacctgagtgatatttttgttatccatcaataacatctgtacggcgtaacgcatacgacactctgtgacaatctggctatagctggtattttcgttttttaatttctttttgagcaggctggggcttaaacataggctactggcgacaattcgcagattccagtaatgctgaatatcgctttgaataatgcggcagacgctgtcgcggacgctgctgcgtaagatatacatcagtagggcaataaaccggctttgctcaagaaagttagacaatacggtaaaaagcaatgcgcgcgtcaactccgcttcgcagggtctgctgggttgctgcttgctgtggttggcggctagccggaacacttccggtgtacggctatgacaagcgataaccggggttgccagccggctccagggctttacacaggttaagttcttatttaaaaacaacagataatcgttgatgatgttacggttgatgtgggtgattaatacgtgatttaacgtactgagttcaatgacgttattgttgcacgcgaaggcggccaggtagtttttcggaagggtaaacgtagcatggttattgacgcttacctctacctctttttcggtcaggatcaccacgcaaggttcactgctgctcaattgcatttcgcactcctcagatatcagaaactccgctcaaaggatctatgcttcctgcatgagtgatcggcccgttcgccgataacgatcttctttctttagcacgctttttagcaattaatcttgatggaattctgatgagagcgaaagaggtaagccaggtcgtacccgacttacctggaggagatttaatactcgagaatgccgtgcgcgacgggcaaatagcgcagagagaaatagagagtgtctttaccgcaagaggaacgtttcgctaacaggctggcaatttctgcgtccggtttcggtttcgctgtaaaggttttgcctttgccggcgacaaaaagttcataaacaacgccgctggcaggggcgggactttggcaatcggcgctggcctgtaaataacgttcacgctgttcagcggtcagtttatccacgccgctgccatcctgtacccagacattaacgccggttgctttaacgtgttccagcagttggcgatagccatcggggctcatgtttccggcgaaaaaactactgatataaaccggttttgcactaacatcgctaatcagccgctgcgcgttgtttaaccatgttagcaaaggctgacgggcggcttcgctgcgccagttcaggtcgtcaatttccgcgctgatgtaccagccatccggcgttatgccaggcgcggcgctccataatctggcttgctggagatcggcagccagcaggcgattaagatagctttccagcgctgcggagctctgtttctggtgcataaaaaattccggatcggcgttcagcccgacaataagcttcagaccagcctgttgcgcagctgcggcccgcttaaacaataacgtgcgctgttctggctgggtaaatgcatcgccgtaacgggtccattgcaaaacaagggtatcgaagccttgcaaacgtaactgactcatcagcccctgccactgggtatcggtaacctgactatctcggttttgtggttgccagataatacctttcatcgcaaaggaaaaagggctgaccaaaagcagtgtcagcaatacgaaaatgaacttacgcatttaccagtgcactccaatggtgagaaacgcgttgttgcgctctccgttacgttgattaatcgccttaaaggtatgttgatactcgacgccgagactgactttgtgcggccaggcgtcgtagtgcgtctcgccggtccagatattccagcggaccccgactccgccaagctgcgcgccctgagtgcctttatcacgatagccgttgtcctgaacgtgagcgtaaggctcaatagtctgtccgttagctaccttctgatgccagctgacgcgataatctgccgtccacgcctgaatatcctggcggatatattgcgccgcatcgaggtacaggttttgggcaaaccagccactaccgttcgggtgccattcgtcgctgtatttgccgccattaaagaaactggcgctggcgcgcagcatggtatcggatgcgccattttggccgttcagcggcaactgctgttcgacggcgatgaaaaagatctgatcgcgcagcggcttccagcgcagaccggtgccggacatcggatttttcaccggcatcatcaccccgttttctccggtatcggcaaagacgcggctataaacactgagcaggtcgccttccagcagcatattgcgtccgatgcggtactcggcttccagttgtccgtagctacgatagcttttccctggcgctgcgccgccgacattattgttagcggtactcattgcgccggaacgcaagccgatggaagaatcgaaactgaacgtccagcggcgaccgacctcctcatgcaaacggcggaaattgaagcgttgttgattttgttctggggtcagtggggttatcagcgcctgattatcaatgtcatcaatcaccagccgggcgtagtgctgcgtcgcaggcatgtcatccagacgctggttcacgtaggccagttgtcggatcagtgccggatcgtccggaagccctttatgcgccggttcgagcatttcccggctctgtgcgatatcaccgctatcccacaaggcgtaaccaagcgctgcctgggtgttgctattattcggttccagttccagcgcggcgcgcaaatcactcaccgcggccgggacattatgacgttggcgataaattgtcgcccgcgcaacgtaagcgttggcagaaggcgcaatattgatactgcgcgtgagatcgttcagtgcgagttccggctgaccaggaatgtaacgttgcgcatgcagccaccagtagagggcattgcttcccagtccacgtttttctgcctgttgtagccagcgatcgcgagccgcaccatttcctgccgcctgggcggtattggcagcagcaagcagatcctcattgctcatgtcgtgaagactgattttctgccaggccgccagtgcggtggcgtagtcctcaacctgatacgcctgataggctaccgcacgatgttgccaggcgctcggttgtcgttgttcggcctgaagccatgcatacaacgccacaccgggtagcgtgtcccgataacactttgccagacggttccaggcggcggcatcgtaggaagggctcatatcgcccagcaagcgaactattgccgggcaattatctgcaatacccggcaactgactttgccactgacgttgctccgccagcggtaagggtttgcttaaaatcgccaccttcgccggcgttgccaggtaaggatgactttccagcagagacgccagtcgcgccattaaagtctggctgacacgcgcatcgccctggaaaggatagcgttgcagcaataaatcggcagcttcgcgactctgctcgttctgcatcagttgccaggttagttgatccaggcgggtaagatttgccggttcttgctgatacagcaatcgtgccagacgcagagcttcagccttgttacgggtcgccacgctgacagcataacgctcctcaagcatttcattggcggggagggtggcgagcagtttttgcgctgcgtcgtactgaccttcttttaacagcaccggtagcgtcgcgccaacaacatactggcggttgtcggcaaactgtaccgtataattcgccaacgcctgaacggggttagcgctgtatttagataacagatagagccaacttttctcttgtgcgtccgtggtaaatagtggcttattttcaatgagataatgctggaggcgtgctttttcgccacgataagccagcgcggtcgcgtaagtaatataactctgaggatcggtgaagatcccctgactttgcagtgccaggatccgatcgtccagctgcccggcaagaagcacgtcaaaccactgacggcgttctgccgcgcttaatgtgttctgctggcgtgcttcattgtatagcgtatctgcctgggaccattgtttcaggtagattgcccgttgcagcagatcggttcgcagcgtttttccttccgggcttgcagcaaacgtcgcatcgttcagttgcgctctggcgacaggtaactgtgccagccgcagggcattctgcccgacttcactgcgacaacgcagggtcggcgcagcatcgcacgctttttgctgggcaagcagttcttcaactgtcgtaacgcttttcacttcaaccggaatagccgccagactgcgctcaagtcgggcatctcctgggtgacgtttcagttgatcctcaagcaacagccgcgcccggtcatcatgaccaaaatggcgataggcttccgcaaggtataaagtcagcggaatattatccggcacctgctggtgtatatattcaaattcgcggatggcggttgcttcgtcgttatttttctgtgccttcagcgctttatcgagacggggataaataacaaaatggcgataatcgctcagccccagctcttctgcgctggtgccgatattgtctgcgagtgcgctggtactcaataaagacgtcagcagtaaaccagaccatccgatgacgcgattaaggttattctccttcattttcggactccagttgcgcaacctgttctgtgtttaaacctgctttgagtaatagactttgcatgctaacttgtaattcgcgttgaattgtcaggacgcgatccaacgtttcctggctgataacgccttcggtgaccaaaaacttgccgagcggcagagaactgcgttcatggcgcaataacaacacgttaattgcactacgattaatatgaccgagcgtggtcagtatttcggcgaacaggaactgatgcggcacatattgccgccagatttcaccggcctgctgttccgtgagccactgatgctgaaccgcattgtacaacattgcccgcggatcgtgaccgcgtcggcgtgcataccagtgacgtaaccctgtgacaatttgtccccgcagaacaatgacgtaacgcactttgcgtccgactttacgcgtcagggccgccaggctaaccgggtcaataccatcttcactgccgacaattaactcgtcattttccagacgcagcggcagtaccgcataatgcagcgccacggaggccggcatttcggcaatcaggctggaagggatctgccaggcatcgatggattcccacgccacgccgttttgctctgccagcgcctgtgccagctgctcggcgctaatcagcccctgcatcagcatactaccgcccaggcgtagaccttcgacgcgattacgcagtgctgtatcgagttgttcttcagtgatgacctgattttccagcagaatttgacctaacgggcgcaagctgcgggtatcgccagtcacgctggggaagtcatgcgttgttttatcccacgccacgcgacgtggatcgccgtgttgaagtacctgttttagcgcgcgccagttggccatgaagttaatcaggttgccccagaaaagacgcaggacggaaagcagcccctgcgtcaggccgtagtagccagtaacgaaaatcacccgctgcacgatgcggttaaccatcaaaccaaagtttagccacagcagggtcattaaccatgcgctgccgctgaaaatagaaaggaaatgccaggcatcgggccacaaactttcatacgccagcaacagcaaaagctggatcatcaccagcatcgcgaggaagctgacaaagttactgattgcccctttgcggtcgcgccagagaaagtagttcagcgtcaggctggaggtccatttatgggttttaaagccttggaaaacaatgccgatgatccagcgggatttttgtcgaaccgcagtgctaaaggtatcggggaaatattcgcgcacgcagatcatgttacttgtccgcgcgtgctgtaaaaatttacgctgctcgcgttctttggcttcgtccaccaccggaaaacggacaaaaatttccgtcatacctttttctttcaggcggaagccaatgtcgtaatcttcagtaagactctgcacgtcgaaagcaataccgtcaccgtcagctaacagtgcggtcacggcgcggcggctgaaacaggtgccgacgcctgcgctgggcacttgtccggcgagggcttcacgcaccggaacatctttgccatgcagctcactaaactcatcaatgtaagtcatgctggtgaagtgcgtccattcgcgttcgaacggatacaccgggatctgaatcagatctttacgctcgaccagatagttgaacagacgcaattccatcggactaatcacatcttcggcgtcatgcagaataaaaccagcaaaagcgaaattggcgctacgctcaaattgggtgatggcgtccagcacgttgttcagacagtcggctttgctggtggggccaggacgcgcgcagactaccttatgcacattcgggaagcgagcgcacacttcgtcaacatcacgctgagtatcggggtcgttggggtaggtgccaacaaagatatgatagttttcgtagtcgagcgtggtcgccgccagctcggccatattgccgatgacgcccgtttcattccacgccggaaccataatcgctaacggtttttcatctggtttatacagttcgcggtaactcattcgcgggtagcggcgataaacactcaacttgcgtttaatgcggcgtacccagtagacgacatcaataaaaaaatcgtccagcccgctgatgaacatgatgaccgctaacgttatcgcgattacttttaagccgtagagccaggtagcaaaaacatcaagaagccagtccacacaaaaaccttacattaacgctggttatgtttagggtggcgtatattaaggttttttatgaattgtgacagctttttaccattaataggtatgactattgcggcacgttatttttacactggttataaaagttgccgtttgctgaaggattaagcgggtaatgtgataacaaaccttgtcccccgcgcatcgctcgttaccgcaaccgtgcctttatgcgcgacaacaatgcttttcactatcgccaggccaataccgctaccttcaccttttcgctggcgggaggggtcaacgcgatagaaacggtcaaacaatcgcggtaagtgctcgggcgcaatgggcgtaccggggttttcgacgataacttgcaccaggtgatcgaccgtctgacagcgcactacaattgtctctccggttggcgtataacgcagggcgttgctaagcaggttgcttagcgcccgacgcagcatcagcggatcgcccgcgacctgacacttgtcgccaacaaaccgcaactccacgccgcgatcttccgctaacgcctcgaaaaaatcgaacactttgccgacttcatccgccaggttgagcattttcttttcggggattagctggttgttatcggcctgagcgagaaacagcatatcgctgaccattttcgccattcgcgtcagctcttcgagattagagtagagcacatcttccagctccttctggctgcggctctggctgagggcgatttcggtttgcgttatgagattcgtaattggtgtgcgaatttcgtgagcgatatccgcactgaaattggactggcgggtaaagacatcctcaatacgctcgatcatatggttgaagctcagtaccagctgttccagctcaatgggcacggtctgcgggtcgaggcgaacgtcgagatctttgctggtaatattctggatttgacggctgacgctgcggatcggcgcgtgacctttatgtaccgccaacagtacgataaagacgatcaggatgctgattacgcttgcggtcataataagtttattcatcaaatcatttatgtaatgaagatgaaaatcgatgctaagcgcgatgtagagcgtataaatcggtttgccgtccaccaacgggccaaccggcaagttaatcatccgccagttgctgtgttccatatgcccgtgaccgtggcctggcatcatcatcgtcgggccggaaaggagatacacctcgccaccctgagcgtctttatcgggtatggcgtcacgcgtaaactcgcggatatccggcgcaccgggggagtgatacaccgttttaccctgactatctgccagggaaatcaacacattggaataaccactgacgatatcttccagcgtcattaagcgtcgggcttgcgtttcgtcagggtgatttagtacccgttcaagggtggcgctaatctcttttaaatcattaatatcctgctcggcaaaatgaacttttacactgtggatcatgatccatgcaaaggcgaaaaacgccgcgatggtggccaggctgataaaaaaggtcaggcgggttgccaggctaaacgggcgctgaaatggcttactgaccatccggcacctcaagcatgtaacccacgccgcgcacggtctgaattagcttcggctcaaagtcgttgtcgattttgccgcgcagccgcttcaccgccacatcaatagcattggtatcgctgtcaaaattcatgtcccatacctggctggcgataaggctgcggggcagcacttcgccctgatggcgaaggaagaactccagcagagtaaactctttactggtcaaagtgatgcgcgtgccgctgcgggtgactttgcggctgacgagatcgaccatcaaatcggcaacctgaaactgactttcgataatcaccgccgccccgcgccgcagtaatgtgcgcacccgcgccagcagttcagcaaaagcgaatggcttcaccaggtagtcatctgcccccaactccagccccttgacgcgatgttcaatggtgccaagcgcggtaagcaacagaatcggcatccctttattggcggagcgtaacatgcgcacgatatcccagccgttcacgtccggcagcataatatcgaggattatcagatcataatcaccggtcatcgccagatggtagccattcagcccgttgtcggccaaatcgaccacaaaaccggcttcggttaaccctttggtcaagtattctccggttttcttttcatcttcgacaatcaacagtttcatatttcctccgcatgttgcccgggcaattctagagtagcgggatcagatggcaatcgcttattggcaaaatgacaattttgtcatttttctgtcaccggaaaatcagagcctggcgagtaaagttggcggcataaaatcaccagaaattatgagcctatgtctccttgtaaacttctgccattttgtgtggcccttgcgctaaccggttgtagtctggcaccggattatcagcgtccggcaatgcccgtgccgcagcagttcagtctcagccagaacggcctggttaacgcagcagataactatcagaacgcgggctggcgcaccttttttgttgataatcaggtgaagacgctgattagcgaggcgctggtgaataatcgggatttgcgcatggcgacgctgaaagtgcaggaggcacgggcgcaatatcgtctgaccgatgccgaccgctacccacagctcaatggcgagggcagcggcagctggagcggtaatcttaaagggaataccgccacgacacgggagtttagcaccggccttaacgccagctttgacctcgattttttcggtcgcttaaagaacatgagcgaagccgagcgacaaaattatttagccactgaggaagctcagcgcgcggtgcatattctgctggtttctaatgtcgcgcaaagctatttcaatcagcaactggcgtatgcgcaattgcaaatagccgaagaaacgctgcgtaattatcagcagagttatgcgtttgtcgaaaaacaactgttgacaggtagcagtaatgttctggcgctggaacaggctcgcggggtgatagaaagtacccgcagcgacatcgctaaacgtcagggggaactggcgcaggcgaataatgcattgcaactgttgctgggaagctacggcaagctgccgcaagcgcagacagtaaacagcgacagcctgcaaagcgttaaattaccggcgggattgagcagccaaatcttattgcagcgcccggatattatggaagctgaacacgcgttaatggcggctaatgccaatattggcgctgcacgcgcggcattttttccgtctataagcctgaccagcggaataagcaccgccagtagcgatctaagcagtttatttaacgccagcagcgggatgtggaattttatacccaaaattgagatccccatttttaatgccggacgcaaccaggccaatctggatatcgccgaaattcgccagcagcagagcgtggtgaattatgaacagaaaatccagaacgcctttaaagaagtggcagatgcgctggcattacgtcaaagcctgaacgatcaaattagcgcccagcagcgttatctggcaagcctgcaaattactttgcaacgggcgcgggcattatatcagcacggcgcagtaagttatctggaagtgctggatgccgagcgttctttatttgcaacccgacaaactttacttgatctgaattatgcccgtcaggttaacgaaatttctttgtataccgcacttggtggcggttgacagcaatatactcgtcatacttcaagttgcatgtgctgcgtctgcgttcgctcaccccagtcacttacttatgtaagctcctggggattcactcgcttgtcgccttcctgcaactcgaattatttagagtatgacttttaactccaggagagaataaatgaaaaaagcactgcaagtcgcaatgttcagtctgtttaccgttattggctttaatgcccaggctaacgaacatcatcatgaaaccatgagcgaagcacaaccacaggttattagcgccactggcgtggtaaagggtatcgatctggaaagcaaaaaaatcaccatccatcacgatccgattgctgccgtgaactggccggagatgaccatgcgctttaccatcaccccgcagacgaaaatgagtgaaattaaaaccggcgacaaagtggcgtttaattttgtccagcagggcaacctttctttattacaggatattaaagtcagccagtaacccaggtttaatgagatgaaaaaaatcgcgcttattatcggcagcatgatcgcgggcggtattatttctgcggcaggttttacctgggttgcaaaggcggaaccgcctgcagaaaaaacgagcaccgcagaacgtaaaatcttattctggtacgacccaatgtatcccaatacgcggttcgataaaccaggtaaaagcccgtttatggatatggatctggtgccgaaatatgccgatgaagagagttctgcgtctggtgtgcgcattgacccgactcagacgcagaatctgggggtgaaaacggctaccgtcacgcgcggaccgctgacttttgcccagagtttcccggcgaatgtcagttacaacgagtatcagtatgccattgtgcaggctcgcgctgccgggtttatcgacaaggtgtatccgcttaccgtgggcgataaagtacaaaagggcacaccgcttctcgacctgaccattcctgactgggtggaagcgcagagtgagtatttactgctgcgcgaaaccggcggtacggcgacccagactgaaggcattcttgagcggctgcgactggcgggaatgccggaggcggatattcgccgcctgatcgccacgcaaaaaatccagactcgctttacgctcaaagcgcccattgatggcgtgatcaccgcgtttgatctgcgcgcgggaatgaatatcgccaaagataacgtggtagcgaaaattcagggtatggacccggtgtgggtcactgctgcgatcccggagtctatcgcctggctggtgaaagatgccagccagtttaccctcaccgttccggcgcgaccggataaaacactcaccatccgcaaatggacgctgctacctggcgtggatgccgcgacccgcacgctgcagctgcgtctggaagtcgacaacgccgacgaggcgctaaaaccgggcatgaacgcctggttgcaactcaacaccgccagcgaaccgatgctgctcattccgagtcaagcgctgattgataccggcagcgaacagcgggtgattaccgttgatgccgacgggcgctttgtaccgaaacgcgttgctgttttccaggcaagccaaggcgtcaccgcattacgctctggtctggcggaaggtgaaaaggtggtttccagcggcctgttcctgattgattccgaagccaatatttctggcgcactggagcggatgcgctctgaaagtgctacccatgcgcattgagggaataaccaatgattgaatggattattcgtcgcagcgtggcgaaccgttttttggtgctgatgggcgcgttgtttctgagcatctggggcacctggaccatcattaatacgccagtggatgcgctgccggatctctccgatgtgcaggttattattaaaaccagctatcccggtcaggcaccacaaatcgttgaaaatcaggtgacttatccgctaaccaccaccatgttgagcgtgcctggcgcgaagactgtgcgcggtttcagtcagtttggcgactcttatgtgtatgtcattttcgaagatggcaccgatccgtactgggcgcgtagccgggtgctggagtacctcaaccaggtacagggtaagctgcctgcgggagtcagcgccgagctggggccagatgccacgggtgttggctggatctatgaatatgcactggtggatcgcagcggtaagcacgatctggccgatttacgcagtttacaggactggtttctcaaatatgagctgaaaaccatccctgacgttgcggaagtggcgagcgtgggcggtgtggtgaaagagtatcaggtggttatcgatccccagcgcctggcgcagtatggcatcagtctcgccgaagtaaaaagcgcgctggatgctagtaaccaggaagcgggcggtagcagcatcgaactggcggaagcggaatatatggtgcgcgccagcggctatctgcaaacgctcgacgactttaatcacatcgttttaaaagccagtgaaaatggcgtgcccgtttatctgcgcgatgttgcgaaggtccagattggcccggagatgcgccggggcattgccgaactaaacggcgaaggcgaagtggcgggcggggtggtgatcctgcgatccggcaaaaacgcccgagaagtgatcgccgccgtgaaggacaaactggaaacgctgaaaagtagtctgccggaaggcgtggagatagttacaacatacgatcgcagccagctcattgaccgcgccatcgacaacctcagcggcaagttgctggaagagtttattgtggtggcggtagtctgtgcgctgtttctctggcatgtgcgcagcgcgctggtggcgattattagcttgccgctggggttgtgtattgcttttattgtcatgcacttccagggactgaatgccaatattatgagcttgggtggcattgcgattgccgtcggggcgatggtcgatgctgctatcgtcatgatcgagaatgcgcataaacggctggaagagtggcagcaccagcatcctgacgccacgctggataataaaacgcgctggcaggtgatcaccgatgcgtctgttgaagtggggccggcgctatttatcagtctgctgattatcacgttgagctttatcccgatcttcaccctggaagggcaggaagggcgtctgtttggcccgttggcgttcaccaaaacgtatgcgatggcgggtgcggcgctgctggcgatcgtagtgatcccgatcctgatgggctactggatccgtggcaaaattccgccggaaagcagtaacccgctcaatcgctttttgattcgtgtttatcatccgctgttgctgaaagtactgcactggccgaaaaccacgctgctggtggcggcgcttagcgtgctgacggttctctggccgctcaataaagttggcggggaatttttaccgcagatcaatgaaggcgacttgttgtatatgccaagcacgctgccggggatttccgcagcagaggcggcgagtatgctgcaaaaaaccgacaagctaattatgagcgtacctgaagtggcgcgggtatttggcaaaaccgggaaagcggaaaccgccaccgattctgctccgctggagatggtagaaacgaccatccagcttaagccgcaggagcagtggcggccaggcatgacgatggacaaaatcattgaggaactggataacaccgtgcggctgccggggctggcgaatctgtgggtgccgccaattcgtaaccgtatcgatatgctcagtaccggcattaaaagccccatcggcattaaagtttccggcactgtgctggcggatatcgacgcgatggctgagcaaattgaagaagtagcgcgaacggtgccaggcgtagcttctgcgcttgccgagcggctggaaggtgggcgctatatcaacgttgagattaaccgtgaaaaagccgcacgttacggtatgacggtggcggatgtgcagttgtttgtgacttctgcggtgggcggggcgatggttggcgaaacggtggaagggattgcccgttatccaattaatctgcgttatccgcaaagctggcgcgatagtccgcaggcactgcgccagctgccgatcctgacgccgatgaagcagcaaatcaccctggcagacgtggccgacattaaagtctctaccggaccgagcatgctgaaaaccgagaatgcgcgcccgacgagctggatttatatcgatgcccgcgatcgtgacatggtgagcgtggttcacgatttgcaaaaagcgatagctgaaaaagtgcagttaaaaccgggcaccagcgtggcattctccgggcagttcgagctactggagcgcgccaaccataagcttaaactcatggtgccgatgacgttgatgattatcttcgtgctgttgtatctggcgttccgtcgggtgggcgaagcgttgctgattatcagcagcgtaccgtttgcgctggtgggcggcatctggttgctgtggtggatgggctttcatctttccgtggcgacgggcactggctttatcgccctcgccggggtcgccgccgaatttggcgtggtgatgctgatgtatttacgtcacgccatagaggccgtgccgagcttgaataatccacaaacattcagcgagcagaagctggatgaggcgttatatcacggcgcggtcctgcgcgtgcgcccgaaagcgatgacggtggcggtgattatcgccggtctgctgccgattctgtggggaacgggggctggtagtgaggtgatgagccggattgccgcgccgatgattggcggcatgatcaccgcacctttgctgagcctgtttattatcccggcggcgtataagctgatgtggctgcaccgacatcgggtacggaaataaaagcaggataccccgtttaaccgtgtggattgtgtcttgcgacgatgggcactaaatgttaaaaggtgcccctcaacaaaaaagacacacaggggaaaggcgtgaaaaacgcgagtaccgtaagcgaagatactgcgagcaatcaagagccgacgcttcatcgcggattacataaccgtcatattcaactgattgcgttgggtggcgcaattggtactggtctgtttcttggcattggcccggcgattcagatggcgggtccggctgtattgctgggctacggcgtcgccgggatcatcgctttcctgattatgcgccagcttggcgaaatggtggttgaggagccggtatccggtagttttgcccactttgcctataaatactggggaccgtttgcgggcttcctctctggctggaactactgggtaatgttcgtgctggtgggaatggcagagctgaccgctgcgggcatctatatgcagtactggttcccggatgttccaacgtggatttgggctgccgccttctttattatcatcaacgccgttaacctggtgaacgtgcgcttatatggcgaaaccgagttctggtttgcgttgattaaagtgctggcaatcatcggtatgatcggctttggcctgtggctgctgttttctggtcacggcggcgagaaagccagtatcgacaacctctggcgctacggtggtttcttcgccaccggctggaatgggctgattttgagcctggcggtaattatgttctccttcggcggtctggagctgattgggattactgccgctgaagcgcgcgatccggaaaaaagcattccaaaagcggtaaatcaggtggtgtatcgcatcctgctgttttacatcggtagtctggtggttttactggcgctctatccgtgggtggaagtgaaatccaacagtagcccgtttgtgatgattttccataatctcgacagcaacgtggtagcttctgcgctgaacttcgtcattctggtagcaagcctgagtgtgtataacagcggggtttactctaacagccgcatgctgtttggcctttctgtgcagggtaatgcgccgaagtttttgactcgcgtcagccgtcgcggtgtgccgattaacagcctgatgctttccggagcgatcactagcctggtggtgttaatcaactatctgctgccgcaaaaagcgtttggtctgctgatggcgctggtggtagcaacgctgctgttgaactggattatgatctgtctggcgcatctgcgttttcgtgcagcgatgcgacgtcaggggcgtgaaacacagtttaaggcgctgctctatccgttcggcaactatctctgcattgccttcctcggcatgattttgctgctgatgtgcacgatggatgatatgcgcttgagtgcgatcctgctgccggtgtggattgtattcctgtttatggcatttaaaacgctgcgtcggaaataaggcattcacgctacatccgacaaaacgatgtcaaccatccgaaaccgctctcatccattcgatgagagcggtttttttaattactgcttaaatgcacccgccagagagcgaatatcattgccggttggcgagtaatccccgcatatccggttgtcaggtcaggatggtaaggcacctgctttacactttcgcccgtggtcagtgatggctgcgggcgaatcgtaccagatgttgtcaattaatcgtgttggcacagcgttatgactatcttttcttttatctgccagtgcacagcaaacatctcattctcacgatgaatgatgacctgctgtttattccagctaattatctgatagtccagaaaacctgcatcagtttggatctcacttgccttaaatgcgctctctttggcggaaaatgccagtgtcagcgccagagaaaaggctaaaccgcagtctgcgagtcgctcgtgttccgctggtgtaataatgttgtctgtcaattctcttgcggtttgtacagaaaaaatttcttctatatcaatgccaatcggttgacgagataccacggctaatgccgtagtcccacagtggctaatactgccgtatacctccgcaggccagacaggttggcgtagctcgccgattgcgggcacacatttatagccatattcccgcaaagcataaacagcagcgatccgtccggctaaatgctctgttttacgtttacgtccagcgtgttgcagttgtgcgtagtgcggcagccagagtaaatcctgctcacaaaaattcgccggatcgaactcaacaaaatgcagcgtatgtccggcaaaggggagggaggtatgcgtagttttcatatcgaccatattcgagactgatgacaaacgcaaaactgcctgatgcgctacgcttatcaggcctacatggtcctgcaatatattgaattggcaagatttttgtaggccggataaggcgttcacgccgcatccggcatgaacgacgcgcactttgtcaacaatctgacgttagcatcagaagtgggtgtttacgctcatataccacgtacgtcccggctcgttataggtatacgccccggcaccggcgatatagttggcccctgccaaatcgcccgtggtctgggcattacccgcacgccacaaacgtttgtcgaacagattgtccacgccgccggtcagactgacattcttcgtcacatcccaggtcgcgctcaggccaacaatgctgtaaggactaatttctttggtttccggtccaaccgctggctgacctttatagttgtacttcttcggctgctgcttgccgtaccaggtgaaggtcgtttgcatgctcaaatcttcccgtgcctgccagctcagcgtactgttcaacgtatactccgggatgatgctcaaacggtcgcccgtggttttgttttcactcttcagcatataagtgatgttattggtccacatcaccgtttcgctaaccggtacgtttaagcttccttccagaccttcaaccaccgctttcggcacgttatcccactgatagagatcggtgccgactgcgttttgccctacagccacatagcccgcttcaatcttattgcgataatcgttacggaaccaggtgacgcccgccagccacccgtcgcgtttgaactccagaccaatctctttgttgatgctggtttctgctttcaggtcatcgttaccttgcagatagcagccgcccgcgctggcatagcaaccctgacctttactgtagagaatgtagttcgggttagtctggtacaggctcggcgctttataagcacgggcgatgcccattttcagcgtgaagtcatcgcctaaaccttggcttatgttcagcgccgggctccagttattgccgacaatactgtgatgatcgaaacgcagccccggcgttacgatggtgctgtcagtcagctccatgttgttttcggcaaacaggctgaaaatttctgctttactatacgggctacggtcggtggtactcacgccatcaatagcgccaccggtattcgttccggtcagtgcctgggtgttggaacttaagtccttcatccgttgctgattccactccgtacccagcgtcagcgtctggttaacgaggaaatcaatcggcaggttaacttcgctgtgcagcatcacgtcatcaagatcgatatcgacgaaatcctgtgtcgctttttcgttaaatttcccttcggtaccgcccgccagaccttccggaatacggctgttacgggtgtgttcgtactgcacccagttgctggtggtcacgccgttatcccagccaccgttccaggtcagcgcgtagttctggcgatacagacggttggtttcatcgccatatttgctgcgggtataggaatcggagttggtattctgggtgtcgcccgcatacaggttaccctggcggctgtaacctgcttccagttccaggctttgcaatggcgcgaaatcccagcgcaccacgccattaatatctttgttgattaccccttcgcgcccggctggtaacgtcgtggcatacgttccggcacgcgcggactgatggccctggttgatatcccacgcgtcagcctgggttttgtcgaggttgccatacaaacggaagctgaattcgtcgcccagcggaccggtcaggctaaagttagtgcgtttggtggcaccttcctctttatgttctggcgcattgaaatatgcgtcccaggagccgtgccactcgccgctgccttttttggtaatgatgttaaccacgccgcccgccgcgccgttgccataacgcgcagctgccggaccacgcagaacttcaatacgttcaatcatttcaggtggcacccaggaagtatcaccacgggtatcgcgctcgccacgccagccctgacgcacgctgttacggctgcttaccggcttgccgtcaatcaaaatcagcgtgttttccggacccataccgcgaatatcaatctgtcggttattcccacgctgaccactggtggagttaccggtcaggttaacgcctggcatggtacggatgatcttgctcacatcgcgggcaaccgggtttttgcggatttcatctgcggtgatggtgctaacgccaggcgcctgtaagttctgctcggcggcggtaacgacaatagtatcgtcatgactaacaggagtatcggtcggctcttgtgcctgcgctaccccataaatccccagattgaccaacaaggccagggaatgaatcttcttgttcattgttttattcctgcatttttgccacgaattgcaactgtcgggcatggtcgtcatcaacacgacgcatcccgctaccgcgaaaacctttgatcctgaaagacacgcagtgcagttggttaattaatgtccgcgcttcccacggcgcgccattacgctattgcaaatgcaaatagttatcaataatattatcaatatatttctgcaatcaatgaaaaattgcacagtaaacatggggttatggtgtgacggcgttaaaagtaggaagtgagagctggtggcagtcgaaacatggcccggaatggcagcgtctgaatgacgaaatgtttgaggtcactttctggtggcgtgatccccaaggttctgaagaatacagcacgataaagcgcgtatgggtctacatcactggtgtgaccgatcaccatcagaacagccagccccagagcatgcagcgaattgcaggcactaacgtctggcagtggacgacacaactcaatgccaactggcgcggcagctactgctttattcccaccgaacgcgatgacattttttctgtaccatcccccgatcgcctcgaattgcgcgaaggctggcgaaaactattaccccaggcgatagccgatccgctgaacctacaaagctggaaaggcgggcgagggcacgctgtttctgcactcgaaatgccgcaagcgcctctgcaaccgggatgggattgtccgcaagcgccagaaatacctgccaaagaaattatctggaaaagtgaacggttgaaaaagagtcggcgtgtatggatttttaccaccggcgatgcaacagcagaagaacgcccgctggcagttttgctcgatggcgaattttgggcgcaaagtatgcccgtctggccagtgctgactagcctgacccatcgtcagcaacttcctcccgccgtgtatgtgttgatcgacgctatcgacaccacgcaccgcgcccacgaactgccgtgtaatgcggatttctggctcgcagtacagcaagagttattacccctggtgaaagctattgccccttttagcgatcgtgccgatcgcaccgtggttgccgggcagagttttggtgggctttccgcgctgtatgccggactgcactggcctgaacgctttggctgtgtattaagccagagtggaagctactggtggccgcatcggggcgggcagcaagagggcgtgttacttgaaaagctaaaagctggtgaagttagcgccgaaggtctgcgcattgtgctggaagcgggtattcgcgagccgatgatcatgcgggccaatcaggcgctgtatgcgcaattacaccccataaaagaatccattttctggcgtcaggttgacggcggacatgatgcgctttgttggcgcggtggcttgatgcaggggctaatcgacctctggcaaccacttttccatgacaggagttgaatatggcattcagtaatcccttcgatgatccgcagggagcgttttacatattgcgcaatgcgcaggggcaattcagtctgtggccgcaacaatgcgtcttaccggcaggctgggacattgtgtgtcagccgcagagtcaggcgtcctgccagcagtggctggaagcccactggcgtactctgacaccgacgaattttacccagttgcaggaggcacaatgagccagcatttacctttggtcgccgcacagcccggcatctggatggcagaaaaactgagtgaattaccctccgcctggagcgtggcgcattacgttgagttaaccggagaggttgatagcccattactggcccgcgcggtggttgccggactagcgcaagcagatacgctgcggatgcgttttacggaagataacggcgaagtctggcagtgggtcgatgatgcgctgacgttcgaactgccagaaattatcgacctacgaaccaacattgatccgcacggtactgcgcaggcattaatgcaggcggatttgcaacaagatctgcgcgtcgatagcggtaaaccactggtctttcatcagctgatacaggtggcggataaccgctggtactggtatcagcgttatcaccatttgctggtcgatggctttagtttcccggccattacccgccagatcgccaatatttactgcacatggctgcgtggcgaaccaacgcctgctagcccatttacgcctttcgctgatgtagtggaagagtaccagcaataccgcgaaagcgaagcctggcagcgtgatgcggcattctgggcagaacagcgtcgtcaactgccgccgcccgcgagtctttctccggcacctttaccggggcgcagcgccagcgcagatattctgcgcctgaaactggaatttaccgacggggaattccgccagctggctacgcaacttagtggtgtgcagcgtaccgatttagcccttgcgctggcagccttgtggctggggcgattgtgcaatcgtatggactacgccgccggatttatctttatgcgtcgactgggcagcgcggcgctgacggctaccggacccgtgctcaacgttttgccgttgggtattcacattgcggcgcaagaaacgctgccggaactggcaacccgactggcagcacaactgaaaaaaatgcgtcgtcatcaacgttacgatgccgaacaaattgtccgtgacagcgggcgagcggcaggtgatgaaccgctgtttggtccggtactcaatatcaaggtatttgattaccaactggatattcctgatgttcaggcgcaaacccataccctggcaaccggtccggttaatgaccttgaactggccctgttcccggatgtacacggtgatttgagtattgagatcctcgccaataaacagcgttacgatgagccaacgttaatccagcatgctgaacgcctgaaaatgctgattgcccagttcgccgcggatccggcgctgttgtgcggcgatgtcgatattatgctgccaggtgagtatgcgcagctggcgcagctcaacgccactcaggttgagattccagaaaccacgcttagcgcgctggtggcagaacaagcggcaaaaacaccggatgctccggcgctggcagatgcgcgttacctgttcagctatcgggaaatgcgcgagcaggtggtggcgctggcgaatctgctgcgtgagcgcggcgttaaaccaggggacagcgtggcggtggcactaccgcgcagcgtctttttgaccctggcactccatgcgatagttgaagctggagcggcctggctaccgctggataccggctatccggacgatcgcctgaaaatgatgctggaagatgcgcgtccgagcctgttaattaccaccgacgatcaactgccgcgctttagcgatgttcccaatttaacaagcctttgctataacgccccgcttacaccgcagggcagtgcgccgctgcaacttagtcaaccgcatcacacggcttatatcatctttacctctggctccaccggcaggccgaaaggggtaatggtcgggcagacggctatcgtcaaccgcctgctttggatgcaaaatcattatccgcttacaggcgaagatgtcgttgcccaaaaaacgccgtgcagttttgatgtcagcgtgtgggagtttttctggccgtttatcgcaggggcaaaactggtgatggctgaaccggaagcgcaccgcgacccgctcgctatgcagcaattctttgccgaatatggcgtaacgaccacgcactttgtgccgagcatgctggcggcatttgttgccagcctgacgccgcaaaccgctcgccagagttgcgcgacgttgaaacaggttttctgtagtggtgaggccttaccggctgatttatgccgcgaatggcaacagttaactggcgcgccgttgcataatctatatggcccgacggaagcggcggtagatgtcagctggtatccggcttttggcgaggaactggcacaggtgcgcggcagcagtgtgccgattggttatccggtatggaatacgggtctgcgtattcttgatgcgatgatgcatccggtgccgccgggtgtggcgggtgatctctatctcactggcattcaactggcgcagggctatctcggacgccccgatctgaccgccagccgctttattgccgatccttttgccccaggtgaacggatgtaccgtaccggagacgttgcccgctggctggataacggcgcggtggagtacctcgggcgcagtgatgatcagctaaaaattcgcgggcagcgtatcgaactgggcgaaatcgatcgcgtgatgcaggcgctgccggatgtcgaacaagccgttacccacgcctgtgtgattaaccaggcggctgccaccggtggtgatgcgcgtcaattggtgggctatctggtgagccaaagcggcctgccgttggataccagcgcattgcaggcgcagcttcgtgaaacattgccaccacatatggtaccggtggttctgctgcaacttccacagttaccacttagcgccaacggcaagctggatcgcaaagccttaccgttgcctgaactgaaggcacaagcgccagggcgtgcgccgaaagcgggcagtgaaacgattatcgccgcggcattcagcagcttgctggggtgtgacgtgcaggatgccgatgctgatttcttcgcgcttggcggtcatagcctactggcaatgaaactggcagcgcagttaagtcggcaggttgcccgccaggtgacgccggggcaagtgatggtcgcgagtactgtcgccaaactggcaacgattattgatgctgaagaagacagcacccggcgtatgggattcgaaaccattctgccgttgcgtgaaggtaatggcccgacgctgttttgtttccatcctgcgtccggttttgcctggcagttcagcgtgctcagccgttatctcgatccacaatggagcattatcggcattcagagtccgcgccccaatggccccatgcagacggcggcaaacctggatgaagtctgcgaagcgcatctggcaacgttacttgaacaacaaccgcatggcccttattacctgctggggtattcccttggcggtacgctggcgcagggtattgcggcgcgactgcgtgcccgtggcgaacaggtggcatttcttggcttgctggatacctggccgccagaaacgcaaaactggcaggaaaaagaagctaatggtctggacccggaagtgctggcggagattaaccgcgaacgcgaggccttcctggcagcacagcagggaagtactagtacggagttgtttaccaccattgaaggcaactacgctgatgctgtgcgcctgctgacgactgctcatagcgtaccgtttgacggtaaagcgacgctgtttgttgctgaacgcacacttcaggaaggtatgagtcccgaacgcgcctggagcccgtggatagcggagctggatatctatcgtcaggattgtgcgcatgtggatattatctctccagggacgtttgaaaaaattgggccgattattcgcgcaacgctaaacaggtaaattaatattatttataaacccataattacagaaaataattatgggttttttatttgtttgatttataggtttgatgaatatttctcttaaatagagtgaatgttgcattcagtggaaggaatttacaaacttcagcttcggataattatcaccaactggtaaagtgagcgccgtggagatttccccctattggactcattttcaggttataccccatgagtagtctgaatattaaacagggaagtgacgctcattttcccgattatcctctggcgagccccagtaataatgaaattgatttacttaatctaatcagtgttttatggcgggccaaaaaaacggtcatggcggtcgtttttgcgtttgcctgcgcaggcttgctgatctctttcatcctgccgcaaaaatggaccagcgcggcggttgtcacgcctccagaacctgttcagtggcaagagttggagaaaagtttcactaagcttcgtgtgctggatctggatatcaaaattgatcgtacagaagcatttaacctgtttatcaagaagtttcagagcgttagcttgctggaagagtacctgcgtagtagtccttatgtgatggaccaattaaaagaggcgaaaatcgacgaactggatttgcatcgcgcaattgtcgcattgagcgaaaaaatgaaagcggttgatgacaatgccagtaagaaaaaagatgaaccgagtctgtatacctcctggacgctaagttttaccgcgccaaccagtgaagaggcgcagaccgttttgagcgggtatatcgattatatctctacgttggtggtgaaagagagcctagaaaacgtccgtaataaactggagatcaaaacccagtttgaaaaagaaaaactggctcaggatcgcattaaaacgaaaaatcaacttgatgcaaacattcagcgcctcaattatagtctcgacattgccaacgcggcaggaattaaaaagcccgtttacagtaatggtcaggccgttaaagatgaccccgatttttctatttctctcggtgcagacggtattgaacgcaaactggaaatagaaaaagcggtcactgacgttgcggaactgaacggtgaattacgtaatcggcagtatcttgtcgagcaattaacaaaagcacatgtcaacgatgtgaattttacgccgtttaaatatcagttaagcccgagtttgccagtgaaaaaagacggtccgggtaaggcgattattgtgatcctttccgcgttgatcggcgggatggtggcttgtggtggcgtgctgttgcgctatgcgatggcatccagaaaacaggatgccatgatggcagaccacttagtttaactatttgcggtactaggtgccgttcgtccgagcggcaccacaagcggcgttccggcaactggatcgtcaatgatcatgcagcgcagaccataaatgcgctcaatcagttcagcagtgacaatctccttcggcgctccctgagcaacaattttcccttcccgcaatgcaatcaaatggctggcgtaacgacaggcctgattaagatcgtgcagcaccgccgccagggtatagcctttttcgcggttcagttcgcttaacaactccagcaaatcaatctgatgactgatatccagccaggtcgtgggttcgtcgagcagcataattgccgtttcctgggccagcaccatcgcgatccacgctcgctggcgttgtccgccagaaagggtatccacgctttgatctgccagatgagttattcccgtggcctgcattgctttcgttaccgcttcttcatcctctttgcgccagcgggtaaacagcggttgatgcggataacgtccacgcgccaccagctcctgcacggtgatatcgcccggcgtggtagcattttgcgccaacagaccaatccggcgtgcaacctctttactggcgtaatgttgaatgtgctcgccatccagccagacatgcccatgagcaggcgtcatcaggcggcttaaggtacgcagtaacgtggatttaccgcagccatttggcccgataattgccgtgaagtgaccatcaggtatttctacagtcagattttccgcaacggtatatttgccatatcccagggttaactgttcgccgcgcaaacgggctacactttcggtcattttttgcgagactcctgaattaacaagacgataaggtaaataccgccgaggctgacggtaacgacgccaaccggaagttgatacggcataaacagttgttgggcgcagagatcggccgccagcagtaacagcgccccgcatagcgccgcctgggttagcccccagcgagcggtgccgctaatgcgtcgggcaatgtgcggtgcgactaaagcaataaaggaaatcggcccggcaagcgctgttgccgcagcggtaagcaccactgcaaccagcatcattaacagacggctacgttcgacgctgacgcccagcgcacacgcggtatcatcgcccatttccagcaagcgcatccggcgtaccagtaaggcggcggcaatgagcatcaatataatgatgggtgcggaagggctggtttttgcccacgtcaggccgttgaggcttccggcattccacaaacctgctgttagcgccgtttctaaagacgctttcagcaacagccaggtattaaaggccaccagcatggcgcgaacgccgataccgataataatcaaccgaaaggtgtcgatgccgttgcgccaggcgagcagccagaccagcaggctagtgacaatgccgcccaccattgcactcagcgcgatagccgtcaggtcctgaccaaacagcaccatcgccaccagcacgccgctccacgccccggtgttaaagcccattacgtcagggctgccgagcgggttacgcatcaggctctgaaaaatcgcgccactgacgcccagtgctgcgccaatcaacagcgccatcagcacgcgtggtaaacgccattcggtgaccaccatcgtcatactgcgcggcgcatcgcccatcagcgcggcgaatacctggctggtttccagcgtgacggcaccgctgcgtaatccccagatacctgcaaccacacaggcggaaaccagcagcaaacaggtgatgagtaatcggcgagagacgtaaatcatgcaccacctcgcgttttacgtcgcacgaggaagatcagcaccggtgcaccaataaacgcactgaccacagaaacgcgcagttcgccgggcacaatcacccgcccgatgatatcggcaaacagcagcagggcaggggtagcaagtagcgtgacgggcaggctccagcgatgatcggcacccaccagccaacgcgccatatgcggcatcatcaggccaataaaggcaatcgggccaactattgccgtcgcactaccacaaagcacggtaatcgccagcagaccaatcaactgtgtgcgcgccacgcgactgcccagcgccgtcgcggtgtcgctgccgaggctcaaactgttcagcgcgcgactcagtaatagcgcagttgctccggcgatcagcaccgggatcagcaccacttttaaggtatgtagattgcgaatatccaggctaccggcttgccagaaacgcaactgatcgtagacgtcaggattaagcagggcgatgccgctggtcagtccttccagcaccgccgccagcgccacgcccgccagggttaaacgcaccggacttaactgcccgccgccctgactgccggtaaaggcaacaatcaaactggccaccagcgccccggcgaaggccatcgccagttgttcctgcgcggaagagtaaccaaacagcgccgcacccagcacaatggcaaagctggctccggcgttcacgccaagcaagccggggtcggcaagtgggtttcgggtgagggtttgcattaacgccccggcaaggccaagcgcgccgcctgccagtaaaccggcaagggtacgcggcagccgcgcgtcgagcacgatggtgcagtcggcgctctggcaggtgccggagaaggcctccagcactacggaagcggggagactttttgccccaatgagcaggcttaatgccgtcgcgataatcagtaataacagcaatccgggcacggcaatggcgcgtgtcacggcaacagaaccagacatacgaacttccatgataatgaaattaattatcgttatcgatcttatttggatatgttagcatgtgcagcctaagaataggtatttaaaatatttgatggcaaggcattgtaatgaataaacaatcctggctgcttaacctcagcctgttgaaaacgcacccggcgtttcgcgcagtattcctcgctcgtttcatcagtattgtgtctctgggtttgctcggcgtcgcggtgccggtgcagatccagatgatgacacattccacctggcaggtggggcttagcgtgacgctgaccggcggcgcgatgtttgttggcctgatggtcggcggtgtgctggcggatcgctatgagcgcaaaaaagtgattttgctggcgcgcggcacctgtggcattggcttcattggactgtgccttaatgcactgctgccggagccgagtttgctggcaatctatttacttggtttatgggatggttttttcgcaagccttggcgttacggcgctattggcggcgacaccagcactggtagggcgtgaaaacttaatgcaggccggggcgatcaccatgttgaccgtgcgtctggggagcgtgattagccccatgattggcggtttattgctggcgaccggtggcgtagcctggaactacgggctggcggcggcgggcacgtttattaccttgctaccgttgttaagccttccggcgttgccaccgccaccgcagccgcgtgagcatccgttgaaaagtttactggcaggatttcgttttctgcttgccagcccgctggtgggcgggattgcgctgctgggtggtttattgacgatggcgagcgcggtgcgggtactgtatccggcgctggctgacaactggcagatgagtgcggcacagattggttttctctacgcggcgatcccgctcggcgcggctattggtgcgttaaccagcgggaagctggcacatagtgcgcgaccagggttattgatgctgctctccacgctgggaagcttcctcgccattggtctgtttggcctgatgccgatgtggattttaggcgtggtttgtctggcgctgttcggctggttgagtgcggtcagcagcttgctgcaatacacaatgctgcaaacgcaaaccccggaagcgatgttagggcggattaacggtttgtggacggcgcagaacgtgacgggcgatgccataggcgcggcgctgctgggtggtttgggcgcgatgatgacaccggttgcttccgcaagcgcgagcggttttggtttgttgattatcggcgtgttgttattgctggtgctggtggagttgcgacattttcgccagacgccgccgcaggtgacagcgtccgacagttaatgcttaaaacagcgccttaagcctatccagcacttgcatggcgctgtagtaatccagacggaacgtctcggttcccagcgcataaacctgcttgttttgtactgcaggcaggtgcgcgagcagcggattagcataaatagcatcggcatctttctgatcaccggcgaacaggaatagactctcgccatttaaccctgcagccagattttccccaccaagctgaatgatgtcatggcgtttaccctgactttggctggcatttaaccctgcgggtaacttcgccagcgtaaagccgagttgttccagcatctgcccttgtgcactttctggcgtccagagattggcactgtgtgcagcggcagtatagacaatggcagtgaccggctgcggcggtaatttgatttgctctttcgccgccgccagttgcttatcaaactgcgcaatccgctctgccgcttgtttctcatgcccggtaatttcgccaagttgcgttaacaggctctgccagcttttgtcgtcgtaattgatgattaatgtcggggcgatggtggaaagctgatcatacagtgccagcgcgctatccccgccggttgcgctaattaaaatcagatccggcatttgcgcggcaacggcttcggcgctcggttcgccgatatagagccgttgcagtttgcgttctttcgccaccttgctccactggcgtaaaaagccctggtcatccgcgacgcggttattcggcgtggtcgcgccgctggcgatcaccggagcatcaatcgccagcagactgccggtcagggtgacgctggtggaaacaatacgctgcggctggctttccagtgtatgtgtgccacggctgtcagtaatctgacgcggccagtcagcggcctgaactgcggctattccactaagcaaaagtcctgttaatagaagggcgttgcggtagagcggggcgagtctcacaaatcagcttcctgttattaataaggttaagggcgtaatgacaaattcgacaaagcgcacaatccgtcccctcgcccctttggggagagggttagggtgaggggaacagccagcactggtgcgaacattaaccctcaccccagccctcaccctggaagggagagggggcagaacggcgcaggacatcacattgcgcttatgcgaatccatcaataatgcttctcattttcattgtaaccacaaccagatgcaaccccgagttgcagattgcgttacctcaagagttgacatagtgcgcgtttgcttttaggttagcgaccgaaaatataaatgataatcattattaaagcctttatcattttgtggaggatgatatggatacgagtctggctgaggaagtacagcagaccatggcaacacttgcgcccaatcgctttttctttatgagcccgtaccgcagttttacgacgagtggatgtttcgcccgcttcgatgaaccggctgtgaacggggatagccccgacagtcccttccagcaaaaactcgccgcgctgtttgccgatgccaaagcgcagggcatcaaaaatccggtgatggtcggggcgattcccttcgatccacgtcagcctagcagcctgtatattcctgaatcctggcagagcttctcccgtcaggaaaaacaagcttccgcacgccgtttcacccgcagccagagcctgaatgtggtggaacgccaggcaattccggagcaaaccacgtttgaacagatggttgcccgcgccgccgcacttaccgccacgccgcaggtcgacaaagtggtgttgagtcggttgattgatatcaccactgacgccgccattgatagtggcgtattgctggaacggttgattgcgcaaaacccggttagttacaacttccatgttccgctggctgatggtggcgtcctgctgggggccagcccggaactgctgctacgtaaagacggcgagcgttttagctccattccgttagccggttccgcgcgtcgtcagccggatgaagtgctcgatcgcgaagcaggtaatcgtctgctggcgagtgaaaaagatcgccatgaacatgaactggtgactcaggcgatgaaagaggtactgcgcgaacgcagtagtgagttacacgttccttcttctccacagctgatcaccacgccgacgctgtggcatctcgcaactccctttgaaggtaaagcgaatagccaagaaaacgcactgactctggcctgtctgctgcatccgacccccgcgctgagcggtttcccgcatcaggccgcgacccaggttattgctgaactggaaccgttcgaccgcgaactgtttggcggcattgtgggttggtgtgacagcgaaggtaacggcgaatgggtggtgaccatccgctgcgcgaagctgcgggaaaatcaggtgcgtctgtttgccggagcggggattgtgcctgcgagcagtccgttgggtgagtggcgcgaaacaggcgtcaaactttctaccatgttgaacgtttttggattgcattaaggagcgaggatgagcattccattcacccgctggccggaagagtttgcccgtcgctatcgggaaaaaggctactggcaggatttgccgctgaccgacattctgacgcgacatgctgcgagtgacagcatcgcggttatcgacggcgagcgacagttgagttatcgggagctgaatcaggcggcggataacctcgcgtgtagtttacgccgtcagggcattaaacctggtgaaaccgcgctggtacaactgggtaacgtcgctgaattgtatattacctttttcgcgctgctgaaactgggcgttgcgccggtgctggcgttgttcagccatcagcgtagtgaactgaacgcctatgccagccagattgaacccgcattgctgattgccgatcgccaacatgcgctgtttagcggggatgatttcctcaatactttcgtcacagaacattcctccattcgcgtggtgcaactgctcaacgacagcggtgagcataacttgcaggatgcgattaaccatccggctgaggattttactgccacgccaagtcctgctgatgaagtggcctatttccagctttccggtggcaccaccggcacaccgaaactgatcccgcgcactcataacgactactactacagcgtgcgtcgtagcgtcgagatttgtcagttcacacaacagacacgctacctgtgcgcgatcccggcggctcataactacgccatgagtagcccaggaagcctgggcgtctttcttgccggaggaacggttgttctggcggccgatcccagcgccacgctctgtttcccattgattgaaaaacatcaggttaacgttaccgcgctggtgccacccgcagtcagcctgtggttgcaggcgctgatcgaaggcgaaagccgggcgcagcttgccagcctgaaactgttacaggtcggcggcgcacgtctttctgccacccttgcggcgcgtattcccgctgagattggctgtcagttgcagcaggtgtttggcatggcggaagggctggtgaactacacccgacttgatgatagcgcggagaaaattatccatacccagggttacccaatgtgtccggatgacgaagtatgggttgccgatgccgaaggaaatccactgccgcaaggggaagtcggacgcctgatgacgcgcgggccgtacaccttccgcggctattacaaaagtccacagcacaatgccagcgcctttgatgccaacggtttttactgttccggcgatctgatctctattgatccagagggttacatcaccgtgcaggggcgcgagaaagatcagattaaccgtggcggcgagaagatcgctgccgaagagatcgaaaacctgctgctgcgccacccggcggtgatctacgccgcactggtgagcatggaagatgagctgatgggcgaaaaaagctgcgcttatctggtggtaaaagagccgctgcgcgcggtgcaggtgcgtcgtttcctgcgtgaacagggtattgccgaatttaaattaccggatcgcgtggagtgtgtggatagtcttccgctgacggcggtcgggaaagtcgataaaaaacaattacgtcagtggctggcgagtcgcgcaagtgcctgaaggagagaacacgatggctattccaaaattacaggcttacgcactgccggagtctcacgatattccgcagaataaagttgactgggcctttgaaccgcaacgtgccgcgttgttaatccatgatatgcaggactattttgtcagcttctggggcgagaactgcccgatgatggagcaggtgatcgcgaatattgctgcgctgcgcgactactgcaaacagcacaatatcccggtttattacaccgcccagccgaaagagcagagcgatgaagatcgggcgctgttgaatgatatgtgggggccgggcctgacccgcagcccggaacagcaaaaggtggtggatcgcctgacgccagatgccgacgacacggtgctggtgaagtggcgctacagcgcgtttcatcgttctccgctggagcaaatgctgaaagagagtggacgtaaccagctgattattaccggggtatatgcccacattggctgtatgaccaccgcaaccgacgcatttatgcgcgatattaaaccgtttatggtggcggatgcgctggccgatttcagccgtgacgagcatttgatgagcctgaaatatgtggccggacgttctggccgggtggtgatgactgaagaattactgccagcacctatccccgccagcaaagcggcgctgcgtgaggtgatcctgccgttgctggacgagtccgatgaaccgttcgatgacgacaacctgatcgactacggtctggatagcgtgcgcatgatggcgctggcggcgcgctggcgcaaagtgcatggtgatatcgactttgtcatgctggcgaaaaacccgaccatcgacgcctggtggaagctactctcccgcgaggtgaaataatggatttcagcggtaaaaatgtctgggtaaccggcgcaggtaaaggtatcggctacgccacggcgctggcgtttgttgaggcgggagcgaaagttacaggttttgatcaagcgttcactcaggagcaatatccctttgcgaccgaagtgatggatgttgccgacgctgcgcaggtcgcgcaagtgtgtcagcgactgttagctgaaacggagcgactggacgcgctggtcaatgcggcgggaattttacgcatgggcgcgaccgatcagctcagtaaagaggactggcagcagacttttgcggttaacgtcggcggtgcgtttaacctgttccagcaaaccatgaaccagtttcgccgtcagcggggcggggcgattgtcactgtggcgtccgacgccgcgcacacgccgcgtattggcatgagtgcttatggcgcaagcaaagcggcgctgaaaagcctggcgttgagcgtcgggctggaactggcgggtagcggcgtgcgctgtaatgtggttagccctggctccaccgacaccgatatgcaacgcacgctgtgggtgagcgatgacgccgaagaacagcgtattcgcggctttggcgagcagtttaaactcggcattccgctggggaaaatcgcccgtccacaagagatcgccaacacgattttgttcctcgcctctgacctcgccagccatattaccctacaggatattgtggtcgatggcggcagtacgctgggggcataagcatgatctggaaacgccatttaacgctcgacgaactgaacgccaccagcgataacacaatggtggcgcatctgggaattgtgtatacccgtctgggcgatgatgtgctggaagccgaaatgccggttgatacccgtactcatcagccgttcggtttactacatggcggcgcgagcgcggcgctggcggaaacgctgggaagcatggccggatttatgatgacccgcgacggacagtgtgtggtaggcacagaacttaatgcaacacaccatcgcccggtgtctgagggaaaggtacgcggcgtctgccagccgctgcatcttggtcggcaaaatcagagctgggaaatcgtcgttttcgatgaacaggggcggcgttgctgcacttgtcggctgggtacggcagttttgggatgaacccgacagaattagatgagattgcaggaaaactcggttaacggagtgatcgagttaacattgttaagttaaatattggtttcaactccgatttacatggttgctgtgttgttaaattgtacaaagatgttatagaaacaaaatgtaacatctctatggacacgcacacggataacaactatgaacaaaagtgggaaatacctcgtctggacagtgctctctgtaatgggagcatttgctctgggatacattgctttaaatcgtggggaacagatcaacgcgctgtggattgtggtggcgagcgtctgtatctatctgatcgcttaccgtttttatgggctgtatatcgccaaaaatgtgctggcggttgacccgacgcgtatgacgccagcggtgcgccataacgacgggctggactatgtgccgacggacaagaaagtgctgttcggtcaccattttgcggccattgccggagcaggtccgctggtggggccggtactggcggcgcaaatgggctacctgccggggatgatctggctgctcgctggggtggttctcgccggtgcggtgcaggatttcatggtgctgtttgtttctacgcgccgtgacggtcgcagcctgggtgagctggtcaaagaagagatggggccaaccgccggggtgattgcgctggtggcctgctttatgatcatggtcattatccttgcagtgctggcgatgatcgtggtgaaagccctgactcatagcccgtggggaacatataccgttgcgttcaccattccgctggcgctgtttatggggatctacctgcgctatctgcgtccggggcgtattggcgaagtgagcgtcatcggtctggtattcctgattttcgccattatctctggcggctgggtggcagaaagtccgacctgggcaccgtactttgactttaccggcgtgcagttgacctggatgctggtgggttacggttttgtggcggcggtgctgccggtgtggttactgctggccccgcgtgactacctctctaccttcctgaaaatcgggactatcgtcggtctggcggtaggcattttgattatgcgcccgacgctgaccatgcctgcgctgaccaaatttgtcgatggcactggcccggtatggaccggtaacctgttcccgttcctgtttatcaccatcgcctgtggcgcggtgtctggcttccatgcgctgatctcttctgggaccacgccgaagatgctggcgaacgaagggcaggcgtgctttatcggctacggtgggatgttaatggaatccttcgtggcgattatggcgctggtttccgcctgtatcatcgatccgggcgtgtattttgccatgaacagcccgatggcggtgctggctccggcagggacggcggatgtggtcgcttctgccgcgcaggtggtgagtagctggggctttagcattacaccagatacgctaaaccagattgccagcgaagtgggtgaacagagcatcatttcccgtgcgggcggtgcgccgacgctggcggtggggatggcctacattctgcacggcgcgctgggcggcatgatggatgtggcgttctggtatcacttcgccattttgtttgaagcactgtttattctgacggcggtggatgcaggtacgcgtgctgcgcgctttatgttgcaggatctgctgggcgtggtgtctcctggcctgaagcggaccgatagtctgcctgctaacctgctggcaacagcgctgtgcgtactggcgtggggctacttcctccatcagggcgtggtcgatccgctgggcggcattaacactctgtggccgctgtttggtattgccaaccagatgctggcagggatggcgctgatgctctgtgccgtggtgttgttcaagatgaaacgtcaacgttacgcctgggtggcgctggtaccaacggcctggctgctgatttgtaccctgaccgcaggctggcagaaagcgtttagcccggatgcgaaagtcggcttcctggccattgctaataagttccaggcaatgatcgacagcggcaatattccgagccagtatactgagagtcagctggcgcaactggtgttcaacaaccgtctggatgccgggttaaccatcttctttatggtggtcgtggtggttctggcactgttcagcattaagacggcacttgcggcattgaaagatccgaagccaacggcgaaagaaacgccgtatgaaccaatgccggaaaatgtcgaggagatcgtggcgcaggcaaaaggcgcacactaaagtcagagtgagggggggatgttggcgaatgttggcttagtgcccagggttccctctcaccctaaccctctccccggtggggcgaggggactgaccgagcgcgttgatagcatttgtaggccggataaggcgttcacgccgcatccggcactctttcagcaacatggttagcggaggccaagatgtttgatagtctggcaaaagccggaaaatatttaggtcaggcggcgaagctgatgattggtatgcctgattacgacaactatgtcgaacatatgcgggttaaccatcccgatcaaacgccgatgacctacgaagagtttttccgtgagcggcaggacgcgcgctacggtggaaaaggcggcgcgcgctgctgctaaatttgtacgtcaggctttaaagctttccacttttttgaacgctgcacgcaacgtatctggtgtcagcgtgactggcaggtaatgaatggactccaccggacgcagggtgtgggcaatcactttgtcgatctccgcctgattattgatatccacttccagctccgccagtgtagtcggcagatgaaaacgctgatacgctccagttaattgcgccagcacatcatcctgacccagcaaggcgctttgcaccagaattccgtaggcgactttggtgccgtggagaaacttctcggtttgcggcagcacggtcagaccgttatgcacggcatgagctgccgccacacgcgtaaaacgatcgcccagaccaccaaccatcccaccaccagcaataatagcatccaccacatcgcaaaaactttgcgttaactgttgattttgctgatcgctcagcgcctgttcgctactgtttaacaagacgtcgcgaatggcttgcgcattattgatccccagtcgcacggttagcggcaacgtttctggttgcggagccagcaccaccgcttcataccatttcgccagcgtgtcaccgatccccgccagcagatattgttgcggtgcattgaggataatctccggttccaccagcaccataaaattggcgtcgtcgaaaatctcataatgcagcgcctgtccggcatcattataccagacggagagcggtgtccaggcggcgcaggtggcggcgatcgtcggaacggcaacaaacggcagaccgagacggcgggcgagggctttcgcggtgtcgagcagtgcaccgccaccgacgccaatcaccacgctgcggtcgtcaccggactcagccgccagttgttgtacatcgctttcgctgcaatgaccgcgaaacaaaatatgctttgcccctggcagtccaaacgctggcggaagtttggtttgcgccgcagcaatggcgcgtttgccgtagatccacaccgcgcgagaaagttgttcatcagtgaaaaaatcgtgcaggtgattgaaacttcctggatgactaaagtagttagccgggccgacgaccacgcggataggattgtgaggcatgttgtgttgtccttattgttttatttagacatctaaacgtcttgattgccaaatactagcatcgtgttatagtgccttcaacacgcaacttcgtcaggtacaataaaaatgacaaataaccctctgattccacaaagcaaacttccacaacttggcaccactattttcacccagatgagcgcgctggcgcagcaacaccaggcgattaacctgagccaaggctttcctgattttgatggtccgcgctatttacaggagcggctggcgcaccacgttgcacagggggcaaaccaatacgcgcccatgaccggcgtgcaggccttgcgcgaggcgattgctcagaaaacggaacgtttgtatggctatcaaccagatgccgatagcgatatcaccgtaacggcaggggcgacggaagcgttatacgcggcgattaccgcactggtgcgcaatggcgatgaagtgatttgttttgatcccagctatgacagttacgcccccgccatcgcgctttctgggggaatagtgaagcgtatggcactgcaaccaccgcattttcgcgttgactggcaggaatttgccgcattattaagcgagcgcaccagactggtgatcctcaacactccgcataaccccagtgcaactgtctggcagcaggctgatttcgccgctttgtggcaggcgatcgccgggcacgagatttttgtcattagcgatgaagtctacgagcacatcaactttagtcaacagggccatgccagtgtgctggcgcatccgcagctgcgtgagcgggcagtggcggtttctagttttggcaagacctatcatatgaccggctggaaagtgggttattgtgttgcgccagcgcccatcagcgccgaaattcgcaaggtacatcagtatctgacctttagcgtgaataccccggcacagctggcgcttgctgatatgctacgtgcagaacctgagcattatcttgcgttaccggacttttatcgccagaagcgcgatattctggtgaatgctttaaatgaaagccggctggagattttaccgtgtgaaggtacatactttttgctggtggattacagcgcggtttctaccctggatgatgttgagttttgccagtggctgacgcaggagcacggcgtagcggcgattccgctgagcgtgttttgcgccgatcccttcccacataaactgattcgtctctgttttgccaagaaggaaagcacgttgctggcagcagctgaacgcctgcgccagctttaattatttaaccgtccaggcgcgggaatattgacggtcggcaaacaactcttgcaggccgttaatttgcttcaggcgcagcacttcgtcgctgtccattcccagctctttgccaattttattatcgtcccatcccaactggctaagttcacggacgatttcgctcatggcggtgatttgatggcgtccacgagcgcgattatgacgaatagtcgcggcgatgcgttgattacgcgtaccttccagacaggtcaccggcaaataaccttttaagcgtaattttaaactactactgcctttaccaatttcatggcggtgaaaaccatccacgatttccatggcatttttatccgtatgtgtgaccacaatgggttgggtaaaaccatctatttcaatggatttttgcagcagttttttttcgggtggtgccacgttgtttgggttgtaatcattaggcataagttggctgtttttaacccacagaacgcaatccactggctcttcacgaaaggggctaacctgatggatcgccatgcggatttcattaatcgctttgatgcgatcatcttccggcaagctggcgagaaattgcgttaaatcctgcgttaatcgttgttgcatagtatcccccattcctgacgttttccttttatccgttcgttataacgctgatagttcttgctttttgtggggctaaaacttaatgcccgacaccagtaatcgttattgagtaaaactttgcatatccgccgccaggaggggatatctttcgcgccaatgtccccttgctgggtttgtggaacctcgatgccttttttctgataccagtgcaaataaatggcgattttattgcggtaatgctcagctgttttttccggcatgctattgagcagcaataatgcatattcttgccagtctaaatgttctggcttgaggattttccgatgcccatagaaatgattgtcatgtccggcgtaaatgccgccactttttaccccgctgactcgtgcgcacatagcagcccagcgatccggttcgataacgtgatagagccataatccttgtcgttgctccgggccaaaaggttcgcaaattcgcatatgacgcagaggaacgcctgcctgatacattaggttatacagtgggttgcagagactttgatgatttgcataccaggtccagatatcagccactttccagtcgtaaatggggtaaatgtaccagctatgaccgcctggtgcggccgtagtccagggtttatcgtcggcaaaacgttgtttatttaaactggcgatggcgacaaaacggttgtaggactcatccgcacggatgccgatcatcatcgccgccggacgtttttgactaaaccattcggcaaactcacgtacaaattgttcgaaggtcatgcctggctggtaaaagcagaaaaagtcagggtcggttatcgcatcttggggaggttgacgtacccattcgacatcaggttcccagcactgccattcgggttggtattgactaagggaattttgcgtcgtaagcgggagcgcaacccagtaaaactcttcgatgacatcggtgtacaactcgcgcagggactgaacatagttaatggtgcaagagaattgcgcctcccagtcgataaacaaaacgcagatttttttgcccatttgtcgggcaagttcggctgtcagatgcagcattaaaccagagtctttgccgccagaaaaactgacacaaacgcggggtagggtgttgagtgtccaggtaatacgctctcgtgcagcttccagaatattgagcggaagaggaattttataaatagacatctgaagacgctctctgaacgttacagggtgatcagtgagataagtctgttaattataaagtaaacactgtaaagcagagtgttttatttttcattcgcgctgtgaataaatagatgaaagttatagtagctgtctgtagttatatatcaaaaactctcatttagacggtcaataaatcgggagaacaccaaattatttaaagaagatttattataggaaatgtaaagctttatactaggtaacggatgttctagttttatctcttttaagttaagaaagtcacggtaggaattataaagttcataggggactattcccagtaaatctgtaactgcaatgctattaatgattgtcagcaaagaggaaccacgaaaactgattttgcgattcataaatctctcgtctatttccatttgaatatcatcaacccctgcacttttagatattaattgggtgaactcttctgccataatttgttcataagtgctattgtcagtaattcgtggatgcctattactacaaattagagtattgcgaatcgtatgcaatggcatgcaaatgacggaacggctgatcactggcatttgggtgatcaccagatcggctttgcggtgaaccaacagttcttcagcattctctgcactcatgaggatatcatggcactcaatctcgacagaggaatcttgccgtaggcagcggatcagcatactattattagagcaagaaatgagctgagggccgtagataataaagtttttctttagttcggacttattgactatattaattgtttgttcaaggcctctgagatttttctcaagatggtgatgcagatttaaccctgttgtcgtcggcgcgataccttttccactgcgaatgaataaagggtcattaaattgcgcacgtaagcgttgtaagctctggctcacggcacttggggtgatatatagactttcagcagctttgctaatgcttaaatgctggtaaatacactcaaatatgacaagaagatttaagtcgaactttttcaagtcgtagagattggccatacactactccggttatatttttcttccatgatatattcacttaatcaatgttttttgcgtatatatttttattgattatgtttttttgcttaactcaggattaagtttttctaaaatagcacagccacttagggcagagcgagcaattcatgcttttttaggatggttgaaaagcagggatatagttcaaccatccatgaattaccttttatttattccccataatgatattaagcgttttctgatcgggcaaccccacggcctgttgtagcgtattttccttactcatgtaatagatagccggcgtgacatttgcccccagatcgtccatcagtttctcattgtcacttaacactttcatttgctctgtacttacgtttgcaggcacgtttagcttaagcttgccaccagaggcttcatattgttgccaggtttttgcgggatctttggaggcaagaattgccgctgctgtcgccgggctttctggcttgataaccccaaccaacaatgttcttaattgcactttgccagaatctacccacgggcgcgcctgctgccagaactgtttacaatatgggcagaacggatcggcgaagacgtagacaatgaccggcgcatcttttttaccgtcgaggagccagtgggattgttccatccgttgccacatttcgcgtccggctggtgcgtaaatttctttttcgataagtgtgttactcaggttttcacctttctcgttgtacatgtaaccagagatagcgtgcttaccatctggagtcaggtagatggtgacgcccatatcctgatactttccgagataacctttcattcctccgggggcatcgaatgttttgatgattgtaatgccctgtttttcaatcgcttttactggagcaggaagttcctctgcgaaggcgattgcaggaagcagagccagtaaaagtatcttttttaacattaatttgtccttttcagtcagtgcaaaagtcgagtaaaaggcataacctatcactgtcataggtaagagcttagatcaggtgattgccctttgtttatgagggtgttgtaatccatgtcgttgttgcatttgtaagggcaacacctcagcctgcaggcaggcactgaagataccaaagggtagttcagattacacggtcacctggaaagggggccattttactttttatcgccgctggcggtgcaaagttcacaaagttgtcttacgaaggttgtaaggtaaaacttatcgatttgataatggaaacgcattagccgaatcggcaaaaattggttaccttacatctcatcgaaaacacggaggaagtatagatgtccttgattaacaccaaaattaaaccttttaaaaaccaggcattcaaaaacggcgaattcatcgaaatcaccgaaaaagataccgaaggccgctggagcgtcttcttcttctacccggctgactttactttcgtatgcccgaccgaactgggtgacgttgctgaccactacgaagaactgcagaaactgggcgtagacgtatacgcagtatctaccgatactcacttcacccacaaagcatggcacagcagctctgaaaccatcgctaaaatcaaatatgcgatgatcggcgacccgactggcgccctgacccgtaacttcgacaacatgcgtgaagatgaaggtctggctgaccgtgcgaccttcgttgttgacccgcagggtatcatccaggcaatcgaagttaccgctgaaggcattggccgtgacgcgtctgacctgctgcgtaaaatcaaagcagcacagtacgtagcttctcacccaggtgaagtttgcccggctaaatggaaagaaggtgaagcaactctggctccgtctctggacctggttggtaaaatctaaatttccttcgtctttcacgccatagcggcgttggcgtcgcccgctcaccccggtcacttacttgtgtaagctcccggggattcacaggctagccgccttgctctgacgcgaaatacttcggaaattcacctaattcttcgggtgctgcggcacccgattttcttccccgcaccatgatgcaagctgcatccaggtagccgcagaggccgcttgcatgatgatgtttaaagcccaggagataaacatgctcgacacaaatatgaaaactcaactcaaggcttaccttgagaaattgaccaagcctgttgagttaattgccacgctggatgacagcgctaaaagcgcagaaatcaaggaactgttggctgaaatcgcagaactgagtgacaaagtcacctttaaagaagataacagcttgccggtgcgtaagccgtctttcctgatcaccaacccaggttccaaccaggggccacgttttgcaggctccccgctgggccacgagttcaccagcctggtactggcgttgctgtggaccggtggtcatccgagcaaagaagcgcagtctctgctggagcagattcgccatattgacggtgattttgaattcgaaacctattacagcctctcttgccacaactgcccggacgtggtgcaggcgctgaacctgatgagcgtactgaacccgcgcatcaagcacactgcaattgacggcggcaccttccagaacgaaatcaccgatcgcaacgtgatgggcgttccggcagtgttcgtaaacgggaaagagtttggtcagggccgcatgacgttgactgaaatcgttgccaaaattgatactggcgcggaaaaacgtgcggcagaagagctgaacaagcgtgatgcttatgacgtattaatcgtcggttccggcccggcgggtgcagcggcagcaatttactccgcacgtaaaggcatccgtaccggtctgatgggcgaacgttttggtggtcagatcctcgataccgttgatatcgaaaactacatttctgtaccgaagactgaagggcagaagctggcaggcgcactgaaagttcacgttgatgaatacgacgttgatgtgatcgacagccagagcgccagcaaactgatcccagcagcagttgaaggtggtctgcatcagattgaaacagcttctggcgcggtactgaaagcacgcagcattatcgtggcgaccggtgcaaaatggcgcaacatgaacgttccgggcgaagatcagtatcgcaccaaaggcgtgacctactgcccgcactgcgacggcccgctgtttaaaggtaaacgcgtagcggttatcggcggcggtaactccggcgtggaagcggcaattgacctggcgggtatcgttgagcacgtaacgctgctggaatttgcgccagaaatgaaagccgaccaggttctgcaggacaaactgcgcagcctgaaaaacgtcgacattattctgaatgcgcaaaccacggaagtgaaaggcgacggcagcaaagtcgttggtctggaatatcgagatcgtgtcagcggcgatattcacaacatcgaactggccggtattttcgtccagattggtctgctgccgaacaccaactggctcgaaggcgcagtcgaacgtaaccgcatgggcgagattatcattgatgcgaaatgcgaaaccaacgtgaaaggcgtgttcgcagcgggtgactgtacgacggttccgtacaagcagatcatcatcgccactggcgaaggtgccaaagcctctctgagtgcttttgactacctgattcgcaccaaaactgcataagaagaagtaagattcacctgcaattgcttagccgccggggtcaaacctggcggcttttttatggcattaaaaagccccgccgggatggctccgggcagggcgggatacttattctggcaattaacgcacaaccagcaccggcagattggcgtggcggatcacgctgctggcgttagaacctaacagatgggtgctaatgcttgggttgcgagaaccaataactacaacatcagcccccagttcttctgccaactcattgacttcatcccgcacgctaccaaaacggacatgttgtttaatgcgggaaggatcgatggtgaagtggctgaccatcgtttgcagacgttcttgtgcttcatgttgcagatgctcttcaaaacgacgcacatcagcggcaaaacggtgcaggctcaggctggcactcccgggtagtacgtgaagtagatgaataactccgtcatcctgggcgaggaattcagcgtggcgaacagctttgtcgctcaattccatttcaaatacatcaactggcataatgattgtcttatacataaccctttctccctgttaatcatgaacaaatcattcgccatgattataatatttatccctgatatttgtctggttctttttccttacgaactgtttctgtgatgaatatattctcactgaacaccaggaattctcccaaaacctgtggtaccgcccgttttcccgctgtgatagctacccttaaagactgactcttttttgaactgtctctggaggttgcatgaaagcattgacttatcacggcccacatcacgttcaggtagaaaatgttcccgatccgggcgttgaacaggcagatgatattattctgcgtattacggcaacggcgatctgtggctctgacctccatctttatcgaggcaaaatacctcaggttaaacatggcgatatttttggtcatgaatttatgggggaagtagttgaaaccggaaaggacgtaaaaaatttgcaaaaaggcgaccgagtggtaattccgttcgtcattgcttgtggcgactgttttttctgtcgattgcaacaatatgccgcctgcgaaaataccaatgcgggtaaaggcgctgcgctcaataaaaaacagataccagctccagcggcattgtttggttatagtcacctgtatggcggcgttcctggtgggcaggcggaatatgtccgcgtccctaaagggaatgtggggccgtttaaagtaccgcctttgcttagtgatgataaagcgcttttcctttctgatattctgccaacggcatggcaggcagcaaaaaatgcgcagatccaacaaggtagtagcgttgcagtctatggtgctggtcctgtgggattgttgacaatcgcctgtgcacggttgctcggtgcggaacagatttttgttgttgatcatcatccctaccgcttgcatttcgccgccgaccgctacggcgcgatcccgattaattttgatgaagacagcgatccggcacagagtattattgaacaaacggcaggtcaccggggcgtggatgcagtaatagacgccgtcggttttgaagcgaaaggcagcaccacggaaacggtgctgactaacctgaaactggagggcagcagcggtaaagcgttgcgtcagtgtattgcggcggtcaggcgtggcggcattgttagcgtaccgggcgtctacgctggatttattcacggtttcctgtttggcgacgcctttgataaagggttgagctttaaaatgggacagacccacgttcacgcatggctgggagaattattaccgttaattgagaaaggattactgaaaccagaagaaattgttacccactatatgccgtttgaagaggccgcccggggatatgagattttcgaaaaacgtgaagaggagtgccgtaaggtgattctggtacccggtgcacaaagcgcagaggcggcgcagaaggcggttagtggtctggtgaatgcgatgccggggggaacaatatgatcgtcaggagtggttttcgaggtaaaggacagccatgacgataatcgccgccataatcagaaatcctatcaggatgtaaaatgcttctgccatggttattcccacaaacgaaacggaataattttgcagcaaaagtgaacagtgagaaccaggaaaaattgctgattttgcgtaaagaggatgcgagtgcatcctctgggcaaagcgagttatcgcttgtgcagatgggattaaagcaggtagtcgccagcagcttctggctggtattcgagttccagcacttcaaggtgggttgcaacgccgcccggaagttcccagtgaatggaatcgccaacgcgcagccccagcagtgcggcacctaccggagccataacggaaagctgagtattgctatcggtcatttttgccggatacaccagcgtgcgcacacgcacttcgccatcgctaagattgcggaatttaacccggctgttcattgtcaccacgtcgtgtggcatctcttctgggctacacatttgggcgcgatccaactctgcgtttaacgcgtcggcgattggcaaaccagcataggcgggttgctccagcagaatatcgatgcgttcggcatccaggtcgttaatgatgatagttggtctggacatttttactccatgtcgtcggtgctgcgagtgtcgcagataaacatacccaaaagaaaaccctcaccgtcaggcggcgagggtttaactcacatgatgatactgactgttgctcactctttgaagtgatttgcgtcacattcagggaattcctcaatgcagcgcattatgtataaatcttaatcgccttggtttatggaagacgaattagcgtgttttgtaaatcagatgattaataacccgctttatcaatcacaaaggttttgccacagttacctgggtgaggttgtggcaagaaactgtttgcagaaagcggagcgttgatggcgtcagctttgatgctgatctgaatttcagtcaaatacgcagggttaccctggcacgttagcttaactgctttcacgttctcttttccccagcttttggcaaaggcggcgtcaaagtcacggcggctcactgttttaccgtaattatccgcaaggaattttccggcttcgctctctttaatttcttgattcaggcgtaccatcgtaccgaagtatgcgtccggatcaaaaccaaagcaggcaccgtgtttggcatattcgtagcgttccaggcaggaacgtccgccagctcctggcatgacttcacttagtttagcggccgtttccagacttaatccggtttccgggctactacacattcggctggcgcgcgcttctggtagattcgggattgggcgagtagcgcaaccgaagcgcatccagcggcgttcatcaacaccacgggcagcaacgcttttaggcaatcctggccacagaccatgtacggtcagaaaatcagctttgttggtcgtttcggtttgcaggcgacattcatctcgttcgttacgatttcgatcgtgttgactctggcaaaatccggtttgccaggagagggccaggacatagcgatcaaaatcgccatactgttttgcctgcaacgctaaggcgttggcagaagagaagggaagcagagaaaccgcgagcaacgcggcgttacgccagaatgctttcataatgggtgtggaactcatacatacactgaatactatctattaaatcataaaaaagcccgccaggtgggcttacctggcgggcgtgatgatttattcagcgtttggcgaacgtattagttccacatggcgagaatcggccagccaaccaacagcaacatagagatgtaaatcaccccgaagattgcgccaagacgccagtaatctttacttttcacatagccacagccgtaaataatcaccccaggaccggttgcatacggcgtcagacagcccatgataccgatagacagcaccagcaggatacacagttgttccattggtacgcccggaatacctttaccgacggccagaataaccggcagcatggttgcggtgtgcgcagacaggctggcaaacaggtagtgtgcaaagtagaacaccagaaccagtacaatcaccgttgcgtttggactgaatccttccaggtgcgtactcatggtaccggcgaaccagtcaataaaaccagaacgagtcaggccgttagccatcacaaccagagttgccaggttgaccagtgtgttccatgcgctgttatagcgggtaatgtctttccaaggcacaacgtgcagggccagcattaggctaactgccagcagaccaaccgcagtagcattaatgacttcactgccaaatacccacaaacctaagctgagcaatacaaggccaatcagtgtccactctctgcgtgtcagcgcacccatggttttcagttcatcacccgcccaggttgccacttcttcactgtgtgtgatttccggtttgtacagcacgtaggaaagccacggcgcaatgataagcaagataaccccaaccggcaggaagcagaggaaccactgcaaccagctaatctggataccggcaattttgctgacgaactccagacccagcacgtttggtgccgcaccggtgacaaacatggagctactcagactggtactaatgaccatcatccacatcaaatagccgccaatacgacgcgcggacggatcgttcgggaaacttttaaacaacggcggcaggtttttaatgaccggaaaaaccgtacccccggtacgcgcggtgttggaaggtgtaaacggtgccagcagaatgtcgataatgacaatcgcataacccaacgtcagcgtgcgtttgcccatgaatttcaccaggaaaagggcaatgcgacgacctaacccggaaacttcataccctaatgcaaaaataaatgcgccaaataccagccataccgtggtgctggaaaaaccagccaggccccatttcagcgcctgtttttgcgcattaaacgctgggtcagctaattctttggcatcaaagagcaggtaattactgccaataacgcaaatagtaaccgcaataaaactgatcgctgttgccggaattggctcgaggatcatgccgacaatcattgccacaaacacagcgaagtaatgccatgcctgcggcggcataccgtcggggacagggataagaaacatgacacccatcaccaccagtggggccaatagtttccatatattatcttttgctaaagacatacgggttctccgaaaattaatatttccaaatttatcaagtgcttaaataattaaatctgtgctaaaaaccaggtaaggatcagtaggtcagcactgccgcctggactgagatttcgttcgatacactccctgtcgaactgccggagataatcgagatcggcgggggttcgaatgccccctttttgcaataatgtttgcgcctcgcgctgtagccagcgcaggcccccctcgccaccgcggcttgcaacgttggtatcgccgttgatcgccatcagtaggagcaaggtatcgagcaatgccagttcaggatctaacccctgatccagcagagtgaggtaatgcggcaaggcgtgattgatcaccagtggataacccgcttcggcttcaccgcgtgcgccggtaaggccaagctgttggtacaaccgttgacctgccgtcagttgactattattggtacgcagttcgcgatcggtcaggccacggcagaaacttgccgccgtagaacaaacggttgttggcgttaccggttggttgagttgaagcaaacggccaattgccgcacatagcagccctaaagaaaaaatgctgcctttatgcgtgtttacgcccgcagtggcgcggaacatatcaccttcgcaagccataccaattgggcgtaatccgtggagtaccgcttctggtgccatttccgcactacaggcaccaaattcaatgaaacggggtagccagccctgaatcgccagcgcgctgcggtggaaatcttccagcgccatatctttgtgcgcaccgcagttaatgcgatccacgaggcctggtttcggactcagattgacttcagtcagcatggcgcgccagcccagcagggcgtactcatcgattaaactcgtcgcaagctttgtggttttagtactcgttgcaggcatgctcatcgttcagcagtgcctccatgttatttagttgacgttgcaggcatcgacatcgttcagcagtgcctccatgcggttgagtaaatcggtcagttgatgggtttttccacgcgcgcagacggctgcgctttgttcgcacaacaggcagcggcgaggcggcagactatagtcgcggcgggagagaatttcgccttcgggcgtcaggacatcgatatcccataaccgcccgagaggatgactatgttcaagctcaatggtggcgagcttgaggtcgcgagccggggcggcaatgctcaacatgccctccggcccgctggcggaaaccagtgcagcctgctcctgaatttgccagccctgttttgcggctaaggcacgcaaggctgtcacgccatgattaaaaattcggcgtgtgacctcgctgtctttaatcggcccaggcgcaaccacggtaaaggagaccagtggaacaggatggcgcttgagccagacgtgttgccgtgcttgcctttcatcccggctgacgagcagctcgggaatacttaccgcatggtggctggcgagttcaggaagcaggtgcatggcttattccttcacctgatgcacaacatcgatcacgctgccatcgcggtaacgcacaacggcaacgacgcggtctgtgaattcaatcggctgtggttcaccggtcagcagacgcgcacgttcgcgcagccactcaatggaaaccactttaatgcccgcttcctgcagacgttctgccagttccggacgtgccgggttaactgcgataccgtggtctgtgaccagaatatcgacactggagcctggggtgatgcaggtcagtacgttatccaccagagtcggaatacgaccgcgtaccagcggcgcgacgatgatggaaagcgcagaggcaatcgcggtatcgcagtgaccaccggaagcaccacgcagtacgccgtcagagccggtcagcacgttaacgttgaactgggtgtcaatttccagcgcgctcagtaccaccacgtcgagacgatcaacgcttgcgcctttgctaccccagttagcgtactggttggcgctgatttcgatgtgattggggttacgggccaggctttgcgcagcatggctgtcaaagctctgcacatccagcagtttgcggatcagacctttttcgtgcaggtcaaccatcgtcgcggtaataccgccaagggcgaagtcggcgcgaatatcgcggctacgcattttgtcttccaggaaacgggttaccgccaggcttgcgccgccggtgccggtttgcatggagaaaccttctttgaagtagccagagttgacaatcacatccgcagcgctacgggcaataagcagttcgcgcgggttagtggtcatacgggtcgcgccagcgccgatttttgcagcatcgccaacgcggtcaactttgacgatcaaatcaacctgatcttgctcaatgcttgccggattatgcggataaggcagcagttcttcggtaagcatcacgacctgttttgcgttgtcggcatcaactattgcatagccgagggagccgcagcaggctttaccggtgtagccgttggcattaccgaattcatcacaggacgggacgccgaggaaagccacgtcgatattcagttcgccgctctgtaccagatgcacacgaccgccgtgagagtggatctgcaccggttctgccagcagaccacgggagatctcttccgccagtggaccacgcaggccggaggtataaatgcgggtaaccacgccctggcgaatgtgttctaccagcggcgcatggcaatcactcagggagctggacgccagggtcaggtttttaaagcccatcttcgcgatgacgtccatcaccatattgacggtcaggtcaccgccacggaaagcgtgatggaaggaaaccgtcatgccgtcctgtaaaccagagcgacgaatcgcttcttccaggttggcgcacagtttgcgatcgcgcgctttttcagcctggtaggtttgctttgggctgttctggaaagcggcaagatcgcattcagcgcgacgattccaggccgctacccgttcttgtcgttgagattgttcaattttctgcgtcattttgattgccttattcttcgcggatgccggaaagttctgcacgggagagcaccagacgggcgcgatcgataaccggaccgtccaccatcttgccgttcagggaaaccacgccgaggccttcgcgagcggcggcttcagcggcttctacgacgcggcgggcgtgatccacttctttctgggtcggtgcgtagaggttgtgcagcagatcaatctgacgcgggttgatcaggcttttgccgtcaaagcccagctgtttgatgtgggcggcttcttgcagaaatccggcttcgttgttagcgtcggaatagacggtatcgaacgcctgaatacccgcagagcgcgcggcctgcaaaatggaacagcgtgcgaacagcagttcagttccttccggggagcgttctgtacgcaggttgcgcacatagtcttctgcaccgagggcgataccgatcaaacgctcggaagcgtgagcgatttccactgcgcgggtaatccccagcggagattcaatcgccgccagcaggccggtgctgccgggttcacgaccacaggctttttcgatacgcaggatctctttttcaatatccagaacatcctgagcggtatcggttttcggcagacgcacaacgtccgcaccaccgcgaacgacggcttccaggtcgttaacaccccattcggaatccagcgcgttgacacgcacaatggtttcaatatcgcgatacagcggatgttgcagcgcgtggtaaaccatgcggcgggcggtgtctttttcacgcaatgctacggagtcttcgaggtcaaacatcagggcatcagccgggtagatgaaggagttgctgaccatcgcggcattggcaccaggcacaaacaacatgctgcggcgggtgcgagttttacgttgttgcaggctagcggaaatcattggcaatcctcccatggcagagccgggataccgctggcgcgtgccagcagggcttccagtcgtgcacgtaaaatgcagtccagtgcgcctttgtcatcgacattcagctgtacgccgcgcacgttgtagcgggcgagaacgtccagaatggtggtgcgaattgcatcgccaaactgtttctcaacgctgctattgatttgcaggtcgatatcctgcgtatcgagtggggcgatgcgtatcatcacatccccagactcaagggtgcctgcaacggcgggctggtttattttcatttttcacctgtttctcatgcgggggtcttttgacgagctgccgcgtcctggcgggagtgctcaagcaggttctgcaaataatgcagcgtgactgcagggaccagcggcgcgatagccgtgagatcgtttttcgccagcagttgacgtacccgggaagcggatatcggcatctcctggtaacgcagccgctcaatttcaaccagttcgatgggcggtgcggagatagtcggcgtttccagccagtagcgcatatcctggttgtactgggcggtaacgcgacaaaagggttcagtaccgacaaagcggtgagttacacccagcgcgggagcgaggtactgacggaaaatcttcagatcaatttcggtgtaacaatggttaatgacgctctgttctttaatgaagtagcaagggaacgtagcgcgggagatgatgtattcggagccacgatgcacagtcaggcgtggaatatcggcggtgccttttaacaccaaatccagccggtcttcataggggaagcgactagaatcttctttgactaaaaacagatgcaaccagtcgcactgtgccgcagcctgttgaatcagataacggtgaccattcgtaaagggattggcgttcatcacaatgcagccaatcttgttccctggatgacgaaattttttcaggctttcggcatagcgtttcagtcgcgtggcgctgttttccatcagcaccatcacgccgggtacgctggtcagcgtggaaaaaccgcactggcggaacagcgcctcgtattcggttttggtataaataaacagatgcgtgctgtgccgctcataggcgaggtttatcaattcagtggctaatgtcagcgccagtccttcaccgcggacggattcactgatagcaacgcatttaataatatttccggcaattccaccgcacgcgataagcttttcatcgcgggttacggtaataaatacttcgactgtggtgtcaacgctcaaatcattttcatgcaggaattgggcgatttccgccatttttttattttcactacgttttacgcgggtgaaaatatcattgccgaacataataaatagtatcctgaaggtgcatgttgttatcgatttgcaacgaatgttgttcaatgttgcaaactgataaccttttattttcacttgggagaaagggggtgatcgaggtatatctttttctcctttcgctatacatcctaaggagtatttcggcgtgaaattttgatttatttcacatagagttagtggttttttatttatttaatgattttaagttttttaattaatgtaattacgaaatgactcgcaggtttaagtgatttaattgatttaatgaataaaatttgccacgatcataattaatatctatgtattttgattcaacattttaattacatccgtcaaagaggctcgggacaacccgcaaggaaaacaatgttgcagcttaacgagaataaacagtttgcatttttccaaagactggcatttccgctgcgtatctttttgctgattctggtgttcagtatatttgtcattgcagccctggcgcaatattttacggccagttttgaggactatttaacgcttcatgtacgcgacatggcaatgaatcaggcgaaaattattgcctccaatgacagtgtcatctctgcggtgaaaacgcgtgactacaaacggctggcgaccatcgctaacaaattacaaagagataccgattttgattatgtggtgattggggaccggcacagcatccgcctttaccatcctaatccggagaaaattggttatcctatgcagttcaccaaacagggcgcgctggagaaaggggagagctacttcattaccgggaaagggagtatggggatggcgatgcgcgccaaaacgccaatctttgatgacgatggaaaagtcatcggcgtggtgagcattggctacctggtgagtaaaatcgatagctggcgggctgagtttttattaccgatggcaggtgtgtttgtcgtgctgttagggattctgatgttgctgagctggttcctggccgcgcatatccgtcggcagatgatgggcatggagccaaagcaaatcgcacgcgtggtccgtcagcaagaggcgctgtttagtagcgtttatgaagggctgattgcggtggatccgcatggttacattaccgccatcaatcgtaacgcaagaaagatgctggggctgagttcccccggacggcaatggttgggtaaacccattgttgaagtggtcaggcccgccgatttctttaccgaacagattgatgaaaaacgtcaggatgtggtggcgaactttaacggtctgagcgttattgccaaccgggaagctattcgtagtggtgatgatttgctgggggccattatcagctttcgtagtaaagacgaaatttccaccctcaatgcgcaactgacgcaaataaaacaatacgttgagagccttcgtacattgcgacacgagcatctcaattggatgagcacgctcaatggtctgttgcagatgaaagagtatgatcgcgtgctggcgatggtgcagggggagtctcaggcccagcaacagcttattgacagcctgcgcgaggcgtttgccgatcgccaggtggcggggctgctttttggtaaagtgcagcgcgcccgggaactggggctaaaaatgatcattgtccccggtagccagcttagccaactgccgccaggactggatagcaccgagtttgcagccattgtgggcaatttacttgataacgccttcgaagccagcctgcgtagcgatgaaggaaacaagatcgttgaattattcctcagcgatgaaggcgatgatgtggtgattgaagtcgccgatcagggctgcggcgttccagagtctctacgagacaaaatatttgagcagggggtcagtacgcgtgctgacgagcccggtgaacatggcattgggttgtacttgattgccagctacgtaacgcgctgcggtggtgttatcactctcgaagataatgatccctgcggtaccttatttagtatctatattccgaaagtgaaacctaatgacagctccattaaccctattgatcgttgaggacgaaacgccgctggcagagatgcatgcggaatatattcgtcacattcccggattcagtcagatattactggcgggaaatctggcgcaggcccgaatgatgatcgagcgttttaagccggggctaatcttgctcgataactatcttcctgacggtagagggattaatttactgcatgaactggtgcaggcgcattatcccggcgacgtggtgtttaccactgcagccagcgatatggaaacggtgtctgaagccgtacgttgtggtgtatttgattatctcattaagcccattgcctatgaacggctggggcaaacgctaacccgtttccgccagcgtaaacatatgctggaaagtattgatagcgccagccagaagcaaattgatgagatgtttaatgcttatgctcgcggtgaacctaaggacgagctaccgaccggcattgaccccttgacgctaaacgcggtgcgaaaactgtttaaagagcctggtgtgcaacatacggcagaaacggtggcgcaggcactgaccatcagccgcaccactgccaggcgttatcttgaatattgcgccagccgccatctgattattgctgaaattgttcacggcaaagttggcagaccacaacgcatataccacagtgggtgacatgataaagccggaggaaacttgcctccggcattactatttacttgcctgtgaccgctgctgccgttcctggcaccatcagctctgtagcaacgataacaatcaccaaaccaacaagcaccggtacgctggtgcgttttacgacttcaaacgggctgatcttcgccatcccggcaaccgcaacgactacgccagaaacggggctaagggtacggccaaggttactcgcctgcagcatcgggatagtcaaatacgccgggttaatgccggaagagtgcgccagtttcgggatcatctcaacaaacgcataaaacggcgcattgccactaccggtcgtgactgccgccagcattgtcagaatcaccaataccagcatcaggatgatactcgcgctaccaaagctggtagcgatagaaatcagactttgaataaagccgatggtgctaagcccctgagcgaataccccagcggcaaccagcagcatcaccacgttagcaaacgcatctgccatcccgcgataagccacttccagaccagagaaaactttctgggtattaaagctgcggaggaactccagaatggaggcaatcagcatacaaatcaccagaatagtgatgatgtgtaattgcggaccccatttaccgtcaaaaatcagtacaccgatgatcggcgtgaacggcaaaatggcataaaacgcaggagcagtggtggtgatttcactgacatctaacatttcatgagagatgtgctcttttttatccagataacgttgccagaagaagtgggcgatcgccatgccgataattgcagcaatactgataggcagcgtcgttttgaaggcgaagtcaatcaggctcatttcggaagcttgcgccgccagcaccacatccccactagtcggtgcgagaataatcgccgccggggaggcacaaatggcagcagctgcgccacgactgataccaacgtttaccatcaccggaaatagggttgccatcagcaaaacacccagaccggttgcggaagagacggccagagacatcagacaggcgacaaaataggcggcaatcatcagcaggtaaggggagttaatatactgcaatggtttactcgccagcttgaccaccatatcattcgcgccgatatgggtcatgtaagcggcaaatccacacagcatcataatcatcatgccgaggtcgccgccgcggctcattagtaatattttaacgtattcaacgatatccgtggcgctgtagcctgtactagcctggctggacggtaacactttgtgccccataatggcactgataatcagcaataacaggccaccgacaaataacacaccagtggcggaataccctttaatgatgtagcgagctacacccacaataaccacaaccccaataaggagctcaatgaatgtcagcataatttttcctgtctccaggccccaaagtaaataataaaaaattcctaaagcttaaggaaaaaatatgcccaataaattggcgatgaatgctgattaaaatcaagaaaaactgccattaagacattgaagttgctgtttttatacatagataacaaaacgcatatttagcggttggcaattatcacataataatgtgtgcaaattgatggtggattgatgcaaatttgttaattgcaatggtgttagctgcggctgtgcgctcaaaaaataatctaatatgagcataggttgacgatatatattatatacttcgttaagatgattgttgtatctcgttaaaaaataaaataatttttccttgattgcattttgtcatcaaaaaagacttggtttttcttttttgactattcccatcgcagaaaacgacgcatcatctttaatcgatgcgcggaaatatttaacttgaacaagcggaaataaatagagcagctattcagattattctttatgttgggtctattaaggttatgttaattgtagctttgctatgctagtagtagatttttgataaatgttttatggtcacaaatgaacgtgagtaaatatgtcgctatcttttcctttgtttttattcagttaatcagcgttggtaaagtttttgctaacgcagatgagtggatgacaacgtttagagaaaatattgcacaaacctggcaacagcctgaacattatgatttatatattcctgccatcacctggcatgcacgtttcgcttacgacaaagaaaaaaccgatcgctataacgagcgaccgtggggtggcggttttggcctgagccgttgggatgaaaaaggaaactggcatggcctgtatgccatggcatttaaggacagctggaacaaatgggaaccgattgccggatacggatgggaaagtacctggcgaccgctggcggatgaaaattttcatttaggtctgggattcaccgctggcgtaacggcacgcgataactggaattacatccctctcccggttctactgccattggcctccgtgggttatggcccagtgacttttcagatgacctacattccgggtacctacaacaatggcaatgtgtactttgcctggatgcgctttcagttttgagacaaatgaagttttagtaacttctttaaaatcaatagctaaaataagtaacatcaaaaataacgcgacttttatcactttttagtaaagttacactggacaaagcgtaccacaattggtgtactggtaaccgacacagcatttgtgtctatttttcatgtaaaggtaattttgatgtctaagattaaaggtaacgttaagtggtttaatgagtccaaaggattcggtttcattactccggaagacggcagcaaagacgtgttcgtacacttctctgcaatccagactaatggttttaaaactcttgctgaaggtcagcgcgtagagttcgaaatcactaacggtgccaaaggcccttctgctgcaaacgtaatcgctctgtaagatacgtcagcaagaattcaaaacccgcttaatcagcgggttttttttggtctttagtgtgcggtactggcgctaaacagccagaatgccagtgcggtcatggcaaaagaccccagaaggttgacgaaaacgttcagtaatgcccagccaaagcggccctcttgtaacaaaaacaccacttctgcgctaaatgtactgaaggttgttagaccgccacaaaatccggtggtgattaatactttccacactggatcaatgttcgtcatcctgctgaaccatgcgaatcctattcctatgatgaatgccccaatcaggtttgctgtcagcgtccccaacggaatcgcctgatgcagtgggttaaatcgcatacttaacagccatctcgccacgcttcccgtaccaccgccaataaaaactgctaaaagaagttgtaacactgcaaaatcctgctatttgatttgtatgagtgataagtgtaacgccgaataatcgtcgttggcgaattttacgactctgacaggaggtggcaatgctggttgccgcaggacagtttgctgttacatctgtgtgggaaaagaacgctgagatttgtgccagcttgatggcgcaggcggcggaaaacgacgcaagcctgtttgccctgccggaagcattgctggcgcgcgatgatcatgatgcagatctaagcgttaaaagtgcacagctgctggaaggcgaattcctcggactttacggcgagaaagtaaacgtaacatgatgacgacaattctgacgattcatgttcctagtacgccggggcgcgcatggaatatgctggtggcacttcaggcaggaaacatcgtcgcccgttatgccaaactgcatctctatgatgcatttgccattcaggaaagtcgccgtgttgatgctggtaatgaaatcgctccgttactggaggtggaagggatgaaggtcggtctgatgacctgttatgacttacgctttccagagctggcgctggcacaggcattacagggagctgaaatcctggtacttcctgccgcctgggttcgcgggccgctcaaagagcatcactggagtacgttgcttgccgctcgtgcgctggataccacctgttatatggtggcggcgggggagtgcgggaacaaaaatatcggtcaaagccggattatagatccctttggcgtcaccattgcggcagcgagtgaaatgcctgcactcattatggcggaagtgacgcccgaacgtgtgcgtcaggtgcgcgcgcaactgcccgtcttaaacaaccgtcgctttgcgccgccgcaattattatgatgtttttttactcggcgcttgattcaccttgttacagattgctattgtgtgcgcgcgtcgaatgaccgttaatattctctggtttttaaggcgcgttctgttgccggttatatgtcaagaaggtatctatgggtgagattagtattaccaaactgctggtagttgcggcgctggtcgttctgctgtttgggactaagaagttacgtacgctgggcggagaccttggagcggccattaaagggttcaagaaggcgatgaatgatgacgatgctgcggcgaaaaaaggcgcagacgttgatcttcaggctgaaaagctctctcataaagagtgacgtggcgagcaggacgctccctcaatatcttgttcgatacaaaaaacccgcttcaaaaagcgggttttttatcagacagatgtaagtaattattacaggattacttaacttccatccctttcgcctgcaaatcggcgtggtaagaagagcggacaaacggaccgcatgcagcatgggtaaagcccatcgccagcgcttcggctttcatttcgtcgaactcatccgggctaacgtaacgttgaaccggcaggtgatggcggcttggctgcaaatattgccccagcgttaacatcgtcacaccatgacggcgcaggtcgcgcattacctcaataatttcttcattggtttcacccagtcccaccatcagaccagacttggtcgggatttccggatgcgcttctttaaagcgttccagcagcttcaggctccagttgtaatctgcaccaggccgtacctgacggtaaatacgcggtacgttttccaggttatggttgaacacatctggtggcgttgcagtcagaatatccagagcacgatccatacgaccgcggaaatccggcaccagagtttcaattttgatttgcgggcttttttcccgaatggcagtaatgcaatccgcaaagtgctgggcaccgccatcgcgcaggtcatcacggtcaacggaggtgataaccacataacgcagcgccatatcggcaatggtctgcgccagtttcactggttcattggcatcaggagctaccgggcgaccgtgggcaacatcacagaacggacaacggcgggtacaaatagcgccgaggatcataaacgttgctgtgccgtggttgaagcattccgccaggttagggcaggaggcttcctcgcagacagaatgcaggccatttttgcgcattgcggctttgatgccctggatacgtgtagagtccgctggaagcttgattttcatccattccggcttgcgcagcagggcttcgcgctctgttgccacgtttttaaccgggataagggccatcttatcggcatcgcggtatttaacaccgcgttccatcacaatgggtttactcatagcgtgcgtgttccagttgcgaattacgaaggaaagcgtttcaattcaatagattgttgtaattatcaactatttttgaattaacgactggcagtatatcattgaaacggacctgaaagcagccaaagcggtcgcgaaaatgtaaaattgttgttggattgtgccattttatcgttctgcgctgtgatctggctgtaacaatactttttcaaaatgcattacggataacatctattactccgtgcaggatgggatcacgcaggctgaatttgttgtagtggatagagaaatctatttgctcctcatttaaggacggaaaaggcagtttttccagcggccagcagcggctaaacaggttataaaaacggctgggaataatcgctaacatgtcactgttggcaaccagtgcagcgattgtcaaaatgttgtagctggtgaaattgatttgccggtccggaaacatttcttgaactctctgccgcagaccgctgaaattttgctcttccggtaacagaagtacatgcgcagcgttgtcgatagtctctctgtcatcttctaaagagagtagtggatttccctcgcggcaaattaacaccatattgtcggtgaacagaacatgatgttgcaccgtacgattggtgcaaaacatgttatcgatgatgagatcggtttgaaactgactgagttggttttccgcgtcgctgatgggcgggttgcgcagtaaaagctgcggatagtgagttttaatcgcccgatagatgacaggaaggaccagtgctccgacgctgggagtggtcgcaatagttatcgttcgttgcttatcatagcttccttcgatatccagcgcgccaagaatggactcaaggccctgactgatatactcatgtagatgcatcgcaaatgcggtaggagtgacaccctggcctttgcgaataaacaatgggtcagggaatataacgcgcagtttctgaatagactgactgattgcgctgggggtcagattaagcactttcgctgcattaacgatccctttatgtacatatacagcttcaaaaatagtcagaaggttaagatcaatatttcgtaaggttgtaaatatttgtggtttaccttcactgctctttctgcttaaacagggttcaatttgattattactatccacgcacttactccaattttattcatggaaaaataatatttaaaaaattacaataatcttatgtctaattggaacggaacgcttttgctcaccataatcaactatttcaataggttaatcaatggggtgagttacggagcaaggcgtggcaccgcatttctgcaagtgataaagaaaatatacaaacgcgaaggagatgtaaagcattagcagatattatgagtaatgacccagtgtaaattgggccattgatgtatggaattaagcggtaatatattcgaagtccggattgtttagtagcgctaaaatattttccagtaaacgtggagcaatattattagtcgtcgcttcgggtttccattgacttattttagccatttccattccggcatacccacaaggattaatacgtaaaaatggactaagatccatattgacgtttaatgccagaccgtggaaactacaaccgcgtcgaatacgtaaacccagactgcaaattttcttttccccaacatagacacctggcgcgtcagcccgaggatgcgcttctatacccagttcagccagggtattcaccactgtttgctcaagcaaggtcaccagttcacgcacaccgagtttacggcgtttcaggttaagcaacacatacatcacctgttgccccggcccgtgataagtcacctgcccaccgcgatcgctctggatcaccggaatatcacccggcattaaaatgtgctccgcttttcctgcctgaccttgggtgaataccggatagtgctcgaccagccagatttcatcaagggtactatcatcgcgggtatcggtgaattcatgcatagcctgggagattggctcgtaaggctgaagaccgagctggcggacaagaattttatcctgatacaaaacggcatctccgtggagaatgagtaaaagtgggggaaaagtatatcacagcgaggagaggggagttacccgaccaggagccgggtaacggagaagcgagttacagaaccatgcggacaatatcgattttgcccagttcttcatacagtgtttcaacctgctcgatatgagtggcgttgatagtgatagatacgctgtggtagttgcctttgctgcttggttttaccgttggggtgtagtcacctggcgcatggcgctgtaccacttcaaccacctgatcaaccagctcaggtaacgcctgccccataactttgtaagtaaaaggagtagggaattcaagcagttcgttaagtttggttttcatgtcagctccggcgtaacgtaattaaatagcaactcccgccagaaggcgggagttttttactgatgcttagtatatggggacggaaattacactttcaagtgtttaatttttaaccaaaccagtgatggaacattaatttaatgtaatcaatgattttgccgaagaagttaccttccgggatttcttgcaacacaaccagcgggcgttgctcgatcgttttgccatcaagctggaagttgatagttccgacgacctgattcttttgcagcggcgcatgcaattcactgctgttcagcacatagctggctttcagatctttcatgcgaccacgcggaatggtcaggtacacgtctttatcaacccctaagctagcgcgatcagaatcaccaaaccaaaccggttcagaggcgaactctttacctactttcagtgggttaacggtttcaaagaaacggaagccccaggttagcagttttttactttcggcttcacggcctttaaaagtacgtccgcccattaccgcagaaatcaagcgcatctggccttcagtcgcagaagcaacaaggttgtaacctgctttgtcagtgtgtccggttttgatgccgtcgacattcaggctgttatcccataacaggccgttacggttcagctggcgaataccgttaaacgtaaattctttttctttatagatgctgtattcattcggtacgtcacggatcaatgcctggccgatcagcgccatatctcgcgcggagctgtactgaccatcagcatccagaccatgtaccgtctggaagtgggtatttttcaggcccagtgcgttaacgtagctgttcatcaagccaacaaaagcgtcctggctaccagcggcaaaatcggccatggcgacacaagcatcgttaccgctttgcaggttaataccgcggatcagctgagaaaccggaacctgcatgcccggtttgaggaacatcaggctagaacctttaaacaccgggttaccggtggcccatgcgtcgttgccgatagtgactaaatcagtttctttaaatttaccggctttcattgcctggccgataacgtaactggtcatcattttggtcaggctggcaggatcgcggcggacatctgcgttctgttcggcgagcactttgccggagttatagtcaatcaggatgtaggactccgcatcgatctgcggtacacccgggatcatagttttgatattcaggtcatcggcatgtgcagcagagataaaggctgtgcaaagagccgtggtgagcgccaggcgcttcatgatacgagcggaaaaaatggtattcatggtctgaactacgacatccgtgatggaattaaaaaagtgccctactatagcaaatgcactaccggcaggcatctgactttccgcgtgactttgttaacgtcatttacagaaattgacacatcagatgcctgctttacgttactgcgcggtagtaataaaactctgtaattgggcttcggtttgcaaacgttgctgcaaggtactggcttcggctttgctggcgaatgggccaagctggatccgccagaccgcgccattttgagttacgcgaccggggacgccgaacttctgtcccagttgctgttggtactgttgcgcacgagcctgatcgcttacggccccgacttgcaccataaagttgccgctggcgctttggctgacggcttgcggtgtcaccattgcagggctggttgcaggcgttgtgctcggagctgtaacaacgggctgtggcgcaggcgtcggttcgctgccttccagtacaccaggcgctaaggtcgttggtgcgccgaggaaaccgctactggttaccggcgcgccggtcggatcttcgctttttagcgtgctattactgaccggaagaatgtcaccctgcgggccagacacactacttgttcccgcgccaccgcttaaatcgggaggtgcaggcagggcgtaagtctgtttggcgactgtggtacaagccataccaggaccagaaaggctaccatcctgggcaacaataatcggatcgatacgaactttggtgttgttactcgtgttaagacggtcagctgccgcgcgagaaagactaataacgcggtcgttgccgtaagggccgcgatcattaatgcgcaccacgatcattcgcccgttagccaggttagtgattctggcgtagctggggatcggaagcgttggatgggctgccgtcagctgtgtcggatcgaatgcttcgccagaggccgtcaggttactgccgggttcggcatcatagattgccgccagtcccgcctggctaaatcgagacggatcctgcacgattttgtagcttttaccgtcgcgctggtaatcctgatttgccgtcgcgttcagtggttcgaaacgcgggtccgccccgctaatttcaactatagggccgttacataccgcaggctgcggtacacttaccgtctgttgctgaccatcatcgcttgtacatgccgcgagcattcctgccgcgatgcagatcccgagccactgcttacgcattgcgcacctcttacacgcttttgctcaacattttcctgtgggtgtggatactcattacaatcccgaacccagccatcagcacaattagcgcgcttcctccataactgaccagtgggagcggaacccctacaaccggcagaataccgcttaccataccaatatttacgaagacataaacgaataatatcagcattaagccgccagccatgacgcgaccaaaggtggtttgcgctctggcggctatccacagcccgcgcatgatcagcagaatgtagagagcgagcagaatcagaatgcccactaatcccagctcttccgccagtaccgcgaagataaagtcagtatggcgttcggggagaaattcaagctgactctgagtgccgtgcagccagcctttgccgcgtaatccgccggagccaatagcaattttagactgaataatgtgatagcccgcgccgagtgggtcactttccgggtccaggagcatcattacgcgctggcgctggtaatcatgcatcaggaagaaccacagaatcggaatgaacgccgctaccagcactactgcgacgccaatcagacgccagctaaggccagagaggaacagtacaaacagaccggaaagcgcaacgaggatacttgttcccaggtcaggctgtgcagccaccagcagcgtgggcataaatatcagcaccagcgcgatgccagtgttcttcaagcttggcgggcaaacgtcgcggttgataaagcgcgcaaccatcagtggtacggctattttggcaatttcgctcggctgaaaacgaacaataccgaggtccagccagcgttgagcacctttagagatggcaccgaaagcatctaccgccaccagcaaaataatacagatgatatagagatagggggcccagccttcataaacgcgtggaggaatttgcgccatcaccaccatgatgaccagacccatcgcgatttggccgattttacgctccatcatgccaatatcctgaccgctggcgctccagataaccagggcgctgtaaaccagcaatgccagtaagatcagcagcattgtgggatcgagatggactttatcccagaatgtttttttattcggattatccgtcatgattaatggtcctccgctgcggcaaccgctggattttccgcaggcagatcggtgttgttatcacccagcataatgtggtcgaggatctggcgcatcagtgtaccaaccgccggacccgcaccaccgttctccagaatcatggcgacagccacttgcggattgttgtatggcgcaaaggcggtcatcagtttgtggtcacgtaaacgctcggcaattttgtgcgcattataggtttcgttcgctttcagaccgaagacctgagcggtaccggatttcgccgcaattttgtacggtgcgctagcaaagtatttatgcgccgtaccgttagggcggttagcaacaccgtacataccgtctttcgccagctcccagtaaccggaatgaatatcgccgacgggcggttcatgcggctgtacccatggcacctgtttgccgtcttcggcggtgctcatcagcaaatgaggaaccttcacgataccgtcattaatcaggatcatcagtgccttactcatctggattggggtcgctgtccagtaaccctgaccgataccaaccggaatggtgtcaccctgataccacggttttttaaagcgtttctgtttccattcgcgggtaggcatgttgccggaacgttcttccgccaggtcgataccggtgtaatgaccataaccgaatttacccatccattcggagaggcgatcgatccccatatcgtaggccacctgatagaagaaggtatccgcagattcttccaggcttcttgtgacattcagacgcccgtggccccattttttccagtcacgataacgtttttcgctacctggcagttgccaccagcctgggtcaaacagcgtcgtattgcgcgtgatcaccccggcgctcaatgcgctaaccgccacatagggtttaactgtagacgcgggaggataaaccccctgtgtggcgcggttcaccagcggtgtattcggatcgttcaacaaggcggaataatctttgctggagataccgtcaacaaacaagtttgggtcataactaggcgtggaaaccagcgccagcaccccacctgtacgcggatcggtgactaccacagctgcgcggctacccgccagcagcgtttcaatatattgctggagtttgagatccagcgtcaggtaaatatcgtgtccggcttgcggtggtacttcttttaactggcgaataacacgcccacggttgttaacttcaacctcttcataaccggtctgaccgtgcagcacatcttcatagtaacgctcaatgcccagcttaccgatatcatgcgttgccgcatagttggccagtttgccgtcattattcaggcgttcgacgtctttatcgttgattttgctcacatagccgatgacgtgggtcaacgcgctaccgtaaggatagtaacgacgtttatagcctttaacttcgacacccggaaaacggtactgattgacggcaaagcgagctacttgtacttcggtcaggttagttttcaccggaatagaggtgaaacggtgactacgtgcgcgctcttttcggaatgcagcaatatcgtcatcggtcagatctaccacgctgcgcaaagcgtccagcgtttgctgcacgttatcgactttctccggcatcatttctatctggtagatagtgcggttgagggccagagggataccgttacgatcgtagataatgccgcggctgggcgcgataggcaccagcttaatgcggttttcattagagcgggtctggtagtcggtaaagcgaacaatttgcagattatacaggttggcgataagcacgccggtcagcagcaaaatccccaaaaaggcgaccagcgcccggcgcacaaacagcgcggactctgccgtatagtcgcgaaaagagttctgtagtttcatccgctgcgttttctactcaaagctcccttatcactcacggtgataaggatggttggtggtgatgctccacgcccggtacagactctctgcgaccagcacgcgaaccagcggatgggggagggtaagcgcgctcaggctccagctctgctcagccgccgctttacaggcagggctcaacccttcaggcccgccaatcagtagactgacgtcgcgaccatccagcttccagcgttccagctcagcggctaactgcggcgtatcccagggcttgcctggaatatcgagggtgacaatgcggtttttgcctgcggccgccaacatctgctcaccctctttgtcgagtatgcgcttgatgtccgcattcttgccgcgttttccggccggaatttcaatcagctcgaagggcatatctttcggaaaacgacgcaggtactcggtaaaaccggtttgtacccagtccggcattttcgttcccacggcgacaagttgcagcttcacgcattaactccagagtttttccagttcatacaggcgacggctctcttcctgcatgacatggacaatcacatcgcccaaatccacgacaatccagtcggcgctgttttcaccttctacgccgagcggtaacaggcccgctgcgcgagactcctgcacaacgtggtcagcaatggacataacatgacggctggacgtacccgtacagatgatcatgcagtcggtgatgctggatttgccctgaacgtctaaggcgatgatgtcctgacctttgaggtcatcaattttgtcgataacaaaatcctggagtgctttaccctgcaagttttccccctgggtgaatcaaatagataaaaatggtctgtcagtatacctgaaccagaggcgatttcgggacaattgtcgccgaatcggctttcgaaagtgggctatcatcccaccccgcgccgcagattgcatcgccatttttgtaaaacaatttctacaaagtcgtgtctggcggaaaaagtctggctgcggagaatatcagcctgcccgggtctgtcaatggtcgttgcggcttacccgtaaaaaaacagaaaagtcatgcattctcgaccccgatggcacggctattgaggacgcgtagcgtcgcgaatttttggttgatatcaatggcgctccaacacccctggtcaacgcgaaaatgccacatagcttcggcaggcatgccaattaaacgggcgattaacagactcagtacaccctgatggctgacgactaaaatattctgatagtgctgaaattcactaagccttgcgataaagcgttccacacgttggctaaatgcctgaaatccttcaccgttcgtggggattgcatgctgccagtcattgcaccacgcgctatagttttcggcatcttcttgcatgaggtcgcgatgatgtcgcatctcccagtcgccaaaaaacatttcgttgagttcaggtatgatttgcacggggagctggcggtcactgagaaccagtcgcgcggtatgctgtgcccgttccagttcactgcataaaaccagatcaaaggaaacaccatgtagcagcgtatgcagattttgcgcttgctcaataccgcgcgcggtcaggggggtgggcgcatgaccgctgtaaagaccatcgatattcgcttgcgtttcaccatgacgaattaaccacagtcgcatcatgccctccgtaacgacaggtatcagcgatacaagccttgttggttaatgtaagtcagtaccggttccggcaataaatcctcacaactttcaccgttttgcaaacgttcgcggatgatggtcgcgctgatgttaaaccacggcgtttcagccagataaattttaccggcaggctgaaggtgaagatcttccgggttatgtgtcaaatgatcttccagccattgctggtattgcggttgcgccatttcaagtgggtaacctggacgccgacagacgatcaaatgtgcattgtcgagtatcgtttcgtattcgtaccaggtcggaaaggtcagcagactatcctgaccaataataaacgccagcggcacgtccggtccttgttcctgccgccactctttcagtgtttgcgcagtgtaagagggggcattgcgctttagctcgcgttcatcaagagtaaataatggcttgtcggcaatcgccagttcaagcatgtgtttacgctgcacgctgttcgcttccggctggggacgatgcggaggaacattattagggatgattgtgacccgcgtcagaccaatcaaattcgccagcgtttccacgggttttagatgaccatagtgcaccggatcaaaggtgccgccaaacagagcctgtaaagatttcatatcaaccgtcgataaatacgtccgccaggggtttatggcacaacagaagagataacccttccagctctgcccacacactctgaccgtaatcttgtttgagggtgagttccgttcgtgtcaggagttgcacggcctgacgtaactgcgtctgacttaagcgatttaacgcctcgcccatcatgccccggcggttctgccatacccgatgcttatcaaacaacgcacgcagtggcgtatgggcagactggcgtttcaggttaaccagtaacaacagttcacgttgtaatgtgcgcaacaaaataaccggttcgctgccttccagacgcagttgctgaagaatatgcaatgcgcgcttactttttcccatcaacaaagcatcaacccaatgaaaaggggtgaaatgcgcggcatcattcaccgcctgttcaacgcgcggtaatgtcaatttgccgtctggccagagcaggcttaaacgctccagtgcctgagccagcgccagcaggttaccttcataacagtagcagagcacctgatttgccgcgtcatccagttctaagttgagctgttttgcgcgcgcagcaacccagcggggaagctgagcctgctccggtgtctgacaggtcacctgcacgctgcgattcgcaagcgcagtaaaccaggcggcattttcttgcgctttgcttaatttattaccgcggacgatcaacagcaggtcgtcatgcagaagtccggtgagtgtgagaagttgctcattgatcgccgcattcggtccgttttctggtaacaacagcaatagcgtttgtcgactggcaaacagactcatagcctggcataagctaaagatcgcattccagtcagtgttgggatcaatggaaaaagtgtggtgttcttcgaatccttgtgccgcagctacctgacgaacagcgtcctggctttcctgcaataacagaggatcgttaccaagtaaaagatacgccgcgcgcagcccttcattgagctgcgcgcggagttgttccgggtacaaccgaatcatcagttacccagcgtggtggagacgcgtgcaggcgttgccggagtatccgttgtggtgctcgtctgttcttcgtcggaacgaatatccgcagcacggatgcttggcagcttacgaatcagctgttcggcagcacggtcgtacatctcttttacgatcatgtcttgttcgttatctttcgctaacgccatttgcgggttatcgaagaagctacggaagactttggcgctaatcgggtagatatcacggccggggatcaacacggtcgcattaaccgtcatgatcatctgatactctgctgtttgaccgttacggaatacgcttgcggtatctttcgcgatgctcactttacccaaacgcaaggatggaacgtccttacgcgtggtttctttatcaagcaactcgacaccattcagacgtaactggttacgcaccgcacggcttaatggcccgttcggatcgccactgtccaggatcatgaccttcatagtggaaggaacctgcgtggtatcacgcagatgccagccacacccggcggtgattaacaccgccagagataacaacaatgttgccagatatcgcacgcttcctcccgcgcttagccaacgaccagattgaggagtttacctggtacgtaaatcactttacgtacagtaacgccatcaagatattttgctaccagatgttcctggccagcacgttcgcgaacctgttcttccgttgcgtccaccggaacggtgattttggcacggactttaccgttaacctgcaccacgaccagcgtggagtcttccaccatcgctttttcgtcagcaaccggccacggcgcgttgtcgatatcgccttcgcctttcagttcctgccacagcgtgaagcagatgtgcggggtgaacgggttaagcatacggacaacggccagcagtgcttcctgcatcagagcgcgatcctgctcgccatcggttggtgctttcgccagtttgttcatcagctccataatcgccgcaattgcggtgttgaaggtctgacgacggccgatatcatcggtcactttagcgatcgttttatgcacatcgcgacgcagcgctttctgattttcagtcagcgcatcaacgttcagtgccgcaacatcaccttttgctgtgtgctcgtaaaccagtttccagacacgtttcaggaagcggttagccccttccacaccggattcctgccattcgagagtcatatcagccggagaagcaaacatcataaacagacgaacggtgtccgcgccgtaacgttcaaccatcacctgcgggtcgataccgttgttcttgctcttggacattttgctcatgccggtataaaccagttcatggcctgccgcatctttcgctttcacgatacggcctttctcgtcacgttcaacgatagcatcaaccggggaaacccagttacgttcgccgttttcgccaacatagtagaaggcatctgccagcaccataccctgacacagcaactgtttcgctggttcgtcagagttcaccatgcctgcatcacgcatcagtttgtggaagaagcggaagtagagcaggtgcataatggcgtgttcaataccaccaatgtagatatccaccggcagccagtagttagccgcttcggaatccagcataccttctttgtactgcgggcaagtgtagcgcgcatagtaccaggaggactccataaaggtgtcgaaagtgtcggtttcacgcagtgctggcataccgttaacggtagttttcgcccactccggatctgctttaatcgggctggtaatgccgtccattaccacatcttccggcaggatcaccggcagctggtcgtccggggtcggcattacggtaccgtcttccagcgtcaccatcggaatcggcgcgccccagtaacgctgacgggaaacaccccagtcgcgcaggcggtagttcactttacgctcgccaacgcccatcgcagtcagtttatcggcgatggcgttgaaggccgcttcatggtcaagaccgttgaactcgccagagttgaacagcacgcctttttcagtcagggcttgctgagaaagatctggctcagagccgtcagctgccaggataaccggtttgatgttcaggccgtatttagaggcaaactcgtagtcgcgctggtcgtgccccggtaccgccataactgcgcccgtgccgtactccatcaatacgaagtttgctgcccaaacgggaatttcttcgcccgttaatgggtgaaccgctttaaagccagtatcgacgccttttttctccatcgtcgccatttcagcttcggcaactttggtgttacggcattcgtcaataaaggccgccagttcaggattattttccgccgctttctgcgccagcggatgacccgcagctaccgccaggtaggtacaacccataaaggtgtccgggcgggtagtgtaaacggtcagcgtgttgtcatagtcgttaacgttgaaggtgatctccacgccttcggaacgaccgatccagttacgctgcatggttttaacggtgtctggccagtgatccagtttatccagatcgttgagcagctcgtcagcgtaagcagtgattttgataaaccactgcgggatctctttacgttcaactttggtatcgcagcgccagcagcagccgtcgataacttgttcgttcgccagtacggtctggtcgttcgggcaccagttgaccgcagaagtcttcttatataccaggccttttttatacagctcggtgaagaatttctgttcccaacggtagtattccggcgtacaggttgccagctcgcggctccagtcataaccaaagcccagcattttgagctggtttttcatatacgcgatgttgtcgtacgtccacggtgccggagcggtgttgtttttcaccgccgcgccttccgcaggcagaccaaacgcgtcccagccgatcggctgcaggacgtttttgcccagcatacgctggtagcgggcgatcacgtcaccgatggtgtagttacgtacgtggcccatgtgtagtcgaccagaaggatagggaagcatagacaggcagtaatacttctctttgctctcgtcttcggttacttcaaatgtgcgcttctcatcccaatgaagctgtactttggattctatctcttccgggcggtattgctcttgcatggcagccagtggtcctgttttcaatacggctacaaatgtagcgttgaggtggtttttcagatccgcatagcatagcccaaacgtccgcgtcaaaacagcctttcgcgcactcgacgttgaaatgatgcccggattattcatacattaatttacagagtttgtgggcgtattagcaaagcaaggaacaaagaacgtctattattatagtcagttaacgacccgggagatgaaacgatgaacaaggttgctcaatattaccgtgaactggttgcgagtctgagcgaacgcctgcgcaatggcgaacgtgatatcgacgcactggtggaacaggcgcgcgagcgcgtaataaaaacaggggagttaacgcgaaccgaggtcgatgagctgacgcgagctgtcagacgtgacctggaagagttcgccatgagctatgaagagagcctgaaagaagaatctgacagcgtctttatgcgggtgattaaagaaagcttgtggcaggagctggcagacatcaccgataaaacgcagcttgaatggcgcgaagttttccaggacctcaatcatcatggggtttatcacagcggagaagtggtcgggctgggaaatctggtctgcgagaaatgtcacttccatctcccgatctacacaccggaagtgctgacgctatgcccgaaatgtggtcatgaccagttccagagacgcccgtttgagccgtaatagtctgatttcgcacagcaataaagagaatatgggccgaatgaaattccccggcccttgtttttatctttacagtaaatcttcagtctcacgaatttcctgactgacatctctggttccggaactctgaactttacgatacaggtcgagagcctgtcggagatcgacaggtcttccttctccgtagtgatacataatggccaggttataccaggcagtggcgtcattgcattcagcggctttcgtaaaccattcaaaggcagcctgataatctttctcaacgccttgtccgtgtttatacatataaccgatgttgacgtaagcgccgacgctcccctgagcggcagccttcagataccagtacatcgcttgcttatagtcctggtccaccccttcgccagcgttataatcccatgcaatttgaaactgggcgtgccgattaccctgctgtgcgcttttcaaataccagaatgcggcgagtgtcttgttttgagcaacgccttttccgtcttcataaagatcggccagattgttttgcgcgtcactatggccttgtaatgcagcttgtttgtaccagaaaaatgccagcgcatagtcttttgcgactccgttgccatttctgtacatccacccaagattattttgcgcataagacattccgctctccgcggctatctgataccagacaaccgcttctttataattgggggcttctccacgatccagtgtccagccaagggcgttggaagcgaaagtatggccttgtagggcagcttttttcagccagaagatggcttgctcattatctttatgacggcttttatcctcggtatacttttgccctaaggaatactgtgcttcacaatgaccttgctcagcggccagcttcagccagtaaaaggctttttcgtcgtccggagaatcaattgcgctatcgcgattataataaaacccaacaatatattgagcctcgcaatcgcctttttcagcacgttcgataatctcatctatacttaaattatcgcagcaactactcgtgaaaatcattatcatttccttatggttgcagataaaacatattatatttttatgtgttccatttttgcgtaagccttattttatgcgtattatgtcgcgtcagaaaagtataaataaacgagcctcgcaatgcggctaatattcatttaatgaatatttaaggataaattatatggacatggagagccaaaaaatattgtttgcactttccactccgatggaaatacgcaatgaatgctgtttacctagccatagtagtcccaaaatgtatttaggtacatgcttttttgacctttcttccagttggggaattgatgaccgtgatgacctgctgcgcacaattcaccgaatgatcgataacggtcatgccgctcggttggcagggttttatcaccgctggtttcgttatagcccatgtgaatggcgtgactatcttgctgaactaaatgagcaaggtcaggcttatgcgcaatttgtcgccagcaccgccgaatgctgtggcgaagggggaatcaaagcctgggattatgtccggatgggttttttaagccgaatgggcgtacttaataactggttgagcgaagaagaaagtctatggatccagagccgcattcatctacgggctctacgttattatagtaactggcggcaatactttgccggttatacctttggtcggcaatattggcagtctcccgaagatgatcatctgcctttattacgcgaattcttagcgcgtaaagaatacgacgattccggcaatgatatgttttatcaattatttgccagtgatgatgcgtattaccctaccttgtcctggcaaccattggcttactattctgcatgcccggaaacgcttaaggatatgagcgacctatgaaaaattgctggaagatcctcgatatagaggaaacgactgacgtcgatattatccgccgcgcttatctggcgctgttaccgtcctttcatccagaaaccgatccgcagggttttaaacaacttcgtcaggcgtatgaggaggcgctacggattgcgcagagccctgctaaatctgtttggcaaccagaagaatatgaggtagcagaacatgaaattctgctcgcctttcgtgcgttacttgcctctgatagtgaacgttttctgccctccgcctggcagcgattcattcagcaattaaattattgcagcatggaggagattgatgaattacgctggagcctgtgcacaatcgccatgaacactgcccatttatccttcgagtgcgtggtgttattagcagaaagattgcggtggttacaggaggaaaataccggggaaatagacgaagaagaactggaatcctttttatatgccattgcgaaggggaatgtttttaacttccagaccattctgcatctgcccgttgccgtgcaaaatgacaccatcgatttttaccaaatgttcgctcggatttggagtagccatccacaatggctgacattgtatttagcgcaacatcgcgcagtgattatccccgatgatgcaaaactgcacagaaatttactccgctggtatagcgcaggtcgcctggatatccccgaacttctggattacgcccagagttggcgggaaactgaacctgataatgaagatgcgccttattatgaatacgcgcaacgcgtctattgtggagaaggcgaaagcctgttggcagaactttgtgactactggcgcgagtatccctccacccaggcggatgctttaatgttgcaatggtgccgtcagcatcgggtcgattattacccattactggtgatgatgattgaagcgcgtgatctggttaacgatcagggaaaaccgctactttatgtccccggcgacagcgcccgtacgcgttttcatttatacgaaatactcagcgatgaaaaactctctgcgctggggcgtagtctggtcgagatggttttgcacaaaggacgtaagccgcggatcagtctcacgcgtgatacagaacataccttatggccattatatctagttgccaaacaattagtgcaggcctgccaacctacagaagaaagtttaatgccgattgtgagccgccttgatgcagaaaatcgttgtccactggaagcattaattattcgtcgattattaattcaggcggcgaattttaccgagaagcaaactgttgaaccggagccgcaaccgcagccaatgcccgttgacgatggtgggccaggctgtctgggcatcattaaaattattttctatatttttatctttgctggtttgatagggaaaatactccatctgttcgggtgacagtcgacgttaatgtgcgggaagcccggcaagtaatctttccgcatttttgtaatgttgtttggcggtcagttttaaccatttttgagattcataatggttaacattaataccactgccatttctgtagatcaaacctaaagtatattgagcatgagcatacccttgttcagctgcttccttataccagagaattgctttacgggtgtcgggtttgacccccagacctttgaggtagatccaccccagtttactttgcgcgcgtggattttcctgttccgcactttgctcataccagtatctcgcctgtgtataatccagtggtttaccgtcgctaccatgaagataaaattctccaaggcgatattggctcgtactgtgaccatgaatcgcggaaagctccgtggctgccgtggtgaatggaagactgcccggactgcttaaataatcaaaggcataattcaccatggctttatcacgcaacgtcgttttcttgggttggctaatacaggtaattgctgcaactataaaaattgcgaatatatacattaattttttattcatgtgtgaatgcttcgattttctttttattttgaaagcgtcaagtttatactcatcaataataaaaaagtagtcagttaatgcacttaagggattattaacaaatgaataaggaagaacaatatcttctttttgcgctttctgcgcccatggaaatacttaatcagggttgcaaacccgcgcatgacagcccaaaaatgtatactgggataaaagaattcgagctcagtagttcctggggaataaataatcgtgatgatttaattcagactatttatcagatgactgatgatggtcatgccaatgatttagctggcttatatctgacatggcatcgctcttcccctgaagagtggaaagcattaattgctggtggcagcgagagagggttgatttatacccaattcgttgcccaaaccgctatgtgctgtggggaagggggaatcaaagcctgggattatgttcgaatggggtttctgagtcgggtcggtgtgctcaacaagtggctgacggaagaagagagtttatggctgcaaagccgcgtctatgtacgagctcaccattactatcacagctggatgcactatttttccgcctatagcttaggacgtctctactggcaatcttctcagtgcgaagacaacactagcctacgcgaggcgctaaccctgtacaaatacgatagcgccgggagtcgtatgttcgaagagctggcagcgggaagcgatcgtttctatgccacgcttccctggcagccattaactgtccagtctgaatgcccggtaacgcttaaggatgtgagcgacctatgaaaacatgttggcaaatcctcgaaattgaaagcacgacgcaaatagacattatccgccaggcttatcttgctcgcttaccgttgtgtcatcccgaaaccgatccgcaagggtttaaagcattacgccaggcctatgaagaggccctgcgactggcggtaaatcctgtcgaggaagcagatgatgaagaaaaagatgctgccgctgaacatgaaatactacgtgcattcaggacattactggatagtgaaagtgatcgttttcagccttccgcctggcagaaatttattcagcaattaaatacctggaacatggaggatgtcgatcaattacgctggccgctgtgtgcaatcgccatagaagcgcgatatcttagtttaaattgtgcttctttgctggcagagcgtttgaactggcatagttttaatgacagcgaaggaatggatgaggaagaaagggaggcttttcttgaggccattcaggctggtgattgtttcgatttccttagccttctggaatatcccattgcgttgcagaaccagactgttgagtattacttcgcgctggaacgttgctgccgttaccatcctgactatgtcactgcgtttttggcgatggaaggtccgtggttaattcctgatgatgcaaagttacatcgcaaactgttgcgctggtacagcagcgtgcaaacaggtatggcggaactcattcctgtcgctcaacagtggcaaacggaagaaccagaaagcgaagatgcccggtattacttgtgtgcacaacgtttgtactgcggcgagggggaaagcctgcttgccgatctctgcgcgtactgggaaagttacccatctacacaagctgataatttgttgttgcagtggagcaagcgtcattgcccggattatttcgcgttattagtgatggttatcgaagcgcggagcatggtagatgcgcaaggtcaaccgctgaaatatgttcctggtgagagcgcccggacgcggctgttatgggcggagattttacatagcggaaaattaagcccgttaggtcaaagctttattgagagcttattcttcaagcgcaaagcatgggcgtggtggaaaagcagagtcggtagcgagacagagcaagatagtccgttcctggatttgtatcgggtagcggaacaggtagtacttgaagcgtttccgaaacaagagatgctggcccgtcttaatacaaggctggaaggcggagatgctcatccattagaggccattgtcacccggatgcttttgacgaaagtgaaactcgagccggaggatgaagatgtcgatgagccaacacctgaaaatcatgaagaaaaaaatgatgagggtgaaaaaccacagagcattaccagcattatcaaaatcagtttaacggtgctggtgataggttatgctctcggcaaaatcgcgatgttgtttagctgacgatgtgttttttgcgccgatgccggatgcagcgtttacgccgcatccggcagccgtgtttatgggatctcaatggctaaataatcgctcgcccgccgccgaacttcatccacgcgggccatatcgttactctgcaacgccgcatcaaaatcggtgatcacccggccgatctcttctcgctcgtcacccagcgcccgcgcccacaactcttccagtttggctttaaaggtgcgattgatgagcatatcgcgcggataaattttcaatgcggataaccgcgtccgactctcttcaatctgctgcgcgctcaatgttaccgggctgtggttaatcactctggacttaacgctgccgtcttccagaagcacgtcaacttcaagcaacccgttgatatcataactaaagcgaatatcaatgctctgataagccccggttttcttcaacggcacatcgaaggattccaccagaatgttgtttttaactttgtggttttctccctgatagacgttaaccgtaatactatcctgttccgggtgcatggtactataagtttctacacggctcacgggcacagtggtgtttcgttcaataatcgggctgaaaatgccggaaacgccctggcggttaacttcaacgcccaagctgtaagggcaaatatcagtgaggattacctcttcaatatcttcactgcgtaagcggcaggcggcctggattgctgcgcccagcgcgacaatggtgctcggatcgtaactttgatacggtaatttgccaaacagacgcacggcgattcgctgcaccagcggcatttgactcgcgccgccaaccagcaccagactgtcgatttgactcggcttcagacgcgcatcgcgcaacgcctgttcaatcggcactcgcaagcgattgagcagcggcaaccacaaatcttccagttcgttctcgtaaaattcgcattcccgcgtttcttcctgatactgccagcgaatgtgcaatgggctttgattgctacattttgccgcttccacacaggcgtacaaggctgccagttcactctcgttaagcgtggtcctggcgacatccgcgcgttttaaaacctcatcgaccagcatatgggtaaaatcttcgccaccaagaaagttgtcgccagcggaggcgtgaacttcaatcaccggcgtggcgtactcaagcaccgtaacgtcaaacgtgccgccaccgagatcaaacaccaggctacgggtattttgttgggtatgcaggccatacgccatcgcagctgctgtgggttcattaattaagcgtaccgcatttaacccggctaactccgctgctaaacgggtatgcttgcgttgttcatcgctgaaataagccggaacggagatcaccacatctttaatcggacgttgcagaaattcttcggcatcttcttttaaactgcgtaataccaaagaggacagttctggcgcgttaaatgtgtcgctgcctaaccgccagttggtattactgcccattgcacgtttaaataacgctgccgttttatccggatggctagtacgccgacttacagccggttttccgactaaaatatgattattttcatccatgctaattatggatggtgttaaatattcaccgaacttatttggaattaattgcgcggcaccgtctttccagacggcaattaaactattggtagtaccgagatcgataccaatggcgagttctgcattatccattgcatttatatcttgaaagaaaaagagataaacagattaagaccacccaggtaacgcgtggtgatcttaatcaatgacgtgtgttaagcgtaaaatttcagacgatcagccagtaaatcaacaaagccctgacgatcaacatcgaccattacggtggcattcggtttattgcctgtcagataataataatcaacaaccgtcataccctgggtatatttcccctgtgtttccacgccaacccagcgctcaacagaggtaaataactccggtttcaacagccaggcgatggtgcatgggtcatgcagtggtgcgccgacaaagccccatttttcgtctttatgatattcgaggaagaaatccagcagttcggcaacaatggtactaacagggttaccaatcgcgcggaaacgctcggtgtcttcaacgtggatttgtgctttatgagtaacatccagaccggccatcaccaccgggatcccactctggaagacaatttctgccgcttccgggtcaacgtaaatattaaattcagccgcaggcgtccagttacccagccccatagcgccacccataatcacgatacgggcaattttgctatgcagttccggatggctattgagcagcaaggcaacgttagtttgcggtccggtagacacaatggtgacaggttccgcactttcacgcagcgttttcgccatcagctctaccgccgtacagttttgcggtgcgaatgtcggttccggtaatgccgggccgtcgagaccgctttcgccgtgcacattgtccgcgataatcaactcacgcattaacggttttaccgcgccgcctgctaccggaatatcggtgcgattaagcaaggtcagcatacgcagaacattgcgtaaggttttttctggtgtctggtttccggcggaagacgtaattgctttgacatcaagctctggactggcgagggcgagaactattgcgatagcgtcgtcatgacctgggtcgcaatctaacagaattggcagtgccattgttgctccttgttgtgtgcttctttgcgacaagggtaacgccaggatgtaacagatacgaggggcgaaacgataaagcgtgagatggcgcgcaattgggtatgcgcgccagagtgattaatgcaggattttcgcgaggaagtcttttgcgcggtcgcttttcggatcatcgaagaaagcgtctttcgggctgtcttcgacaattttaccctcgtccataaagatcacccgattcgccactttacgggcaaagcccatttcgtgggtcaccaccatcatggtcattccttcgttcgccagttccaccatcacgtccagtacttcgttgatcatctccggatccagcgcgcttgtcggttcgtcaaacagcatcgcaataggatccatacacaacgcgcgagcgattgccacacgctgctgctgaccgccggaaagctgcgccggaaacttattggcgtgagcagaaagcccgacacgctccagcagtttcagggctttttcacgagccggcgctttatcgcgtttaagcactttcacctgcgccagggtcaggttttcgataatgctcagatgagggaacagctcgaaatgctggaataccatcccgacgcgggaacgcagctttgccagatcggttttcttgtcgttaaccacgataccatcgacggtgatttcaccttgctgcaccggttcgaggccgttgacggttttaatcagcgtacttttgccggaaccagacgggccgcaaaccaccaccacttcgccttttttcacttcggtactgcagtcggtcagcacctgaaagtgaccataccatttactaacatttttcagggtaatcattatgctgtccttcttttcaagtagctgaccaacaagctcgcgctaagactaataacgaaataaacaaatccggcaaacaggatcatctcaacctgcgtaccatcacgctcaccaatggtactggcggtacggaagaaatcggccagggataacacatacaccagactggtatcctggaacagtacgatgccctgagtgagcagcagcggcaccatcgcgcggaacgcctgcggcagaataatcagtttcatgctctgccagtgagtcattcccaacgccagcgcggcgctgctttgaccacgagaaatactttgaataccagcacggataatctcactatagtaggccgcttcaaacatgctaaacgccaccatcgcgctaattaaacggatatcattttttgggcttaatcccagcacgttttgcagaaaacccggcacgatcaggtaaaaccacagcaaaaccataactaaaggaatgctgcggaatacgttaacgtaggctttggcaaaccacgccacgggcgcaaagctggataaacgcatcaccgccagcatcgtgccccacaaaataccaatcactaccgccgtgacggtgattttcagggtgatcaccagcccgtcgagcagatatggcagggaagggacaatggaactccagtcaaactcgtacattatttgccccccatgttgccaggcaggcgaactttacgttcaaccagcgtcatcaccagcatgataaaagcgttaatcaacacatacgccagcgtaatggcggtaaagctctcccaggcatgggcactgtaatcgagcaatttacccgcctgcgccgccatatccaccagaccgatagtgctggcgatggcggagtttttcaccaggttcatcatctcactggtcatcggcgggacgataacgcgataagcattaggcagcagtacgtatcgataagcctgcggtagcgtcaggcccatcgccagcgcggcatttttttgccctcgcggcaggctctgaatcgcggcgcgtacctgttcgcaaacacgggcggcggtaaacagccccaggcagagcatggaactaaggaaaaactgaatattgggatccagctcggccttaaaccacatgccgattttctccggcagcagctccgggatcaccagataccaggtaaagaattgcacaatcaacggcacgttgcggaacagttcgacatacaacgtacccagaccagagagaaaacggtttggaacggtacgtaaaatgccgaaaaaactaccgacgaggaaagcgataatccaggcgcagatgctcaaagcgatcgtcacctgaaaaccactccagatccaaccaagataggtggtgttgccgaacggggcttgttgtaaaaaaataccccagttccagtctatagacataaatctactccagaaaaaagagggtagcagcgttaactgctaccctcgaagattgttacccagcgtattgcggttttcaggcccgatggggaacgaccatcaggcgtatagtctgtccgtgctacgtaacaatcgagagggctggaatttccgcccctggttcttgtaattagttcagtgccttgtcattcggttctttgaacagtgctttcatttcgtcactcagttcgaaattcatgttcaggtttttcggcggaattggatttttgaaccacttatcaaaccatttttccgcttcaccggaggtctgcacctgagcgatggtgtcatccatcagctttttgaactgcggatcatctttacgcaacatacaaccgtaggcctcctgagactgcggcttgccgacgatttcccagttgtctggtttcttcgctttcgcacgttcaccggccagcagagcgtcatccatcataaaggcaacggcacgaccgctttccagggtgcggaaagagtcaccgtgatctttggcgctgatgatgcgcatattcattttttgctcttcattcagtttgttgagcaaaacttcagaggtagtgccggaagtgacgactacggctttgtctttcaggttggcaaaatctttgatatcgccaccctttttggtcaacaggcgcgtaccgaccacgaaaatagtgtcagagaaagccgcctgtttttggcgttcgacgttgttggtggtagaaccacattcaaaatcgaaagtgccgttttgcagcagtggaatacggttttgactggtaatcggaatcagttttacctgcaagtccggtttgttgagtttctttttcactgcttcaacaatggcgttggagtaatcctggctgtaacccaccactttttgctgattgtcgtaataagagaaaggcacactagattcacggtgaccgacgacaatcacaccgtttttggcgattttgtccagagtactgcccgctgccggggcggcgtcatctgcctgtgccagtcctgcggaaagcgccagggcgaggattgctgtggcaggtttacgtaattgcatatccaactcctttatcttctgcgttaagaacgcatggatacccgttgtgagtgtttgtgttgttatcgtctgcaactttattgtgcagtgttgtgcctgttagggaaggtgccttaggtaacatttagtttggctaaatgtaaagatattgctgttttattgtttgtttttgcgagatgcgccgcaccattccgaagcaaaattcttaaaatgcactcttttagtgctaccgctggattactgtggtgcaactaggttgtactgatgctgtttcagggtttgccttgtataacaaagcaatagatgtgccaaagttggataggagaatattgttatccggataatgcactgatgccgcatccggtgagcgtgccgaaatatgggatgtattccggcacgataagaagggattatttacgtcgctgacgcagactcatcaacacagcagcaaaaccaaacaatgccgtcagcacccacagcggccagttgccggtacgtgcgtatggtgtgagtccggtggtcggcgtcacgttagtggttaacacctcgcgggtgaactgcgggatcatcgcctgaatctcaccctgcgggccaatcaccgccgtaatgccgttgttggtgctgcgcaacagtgggcgcgccagctccagcgcacgcattcgcgccatctggaagtgttgccatggaccaatagatttaccaaaccacgcatcgttggagatagtcagcagatagtcggtatccgggcggaagttatcgcgcacttgctcgccgagaatgatctcgtagcaaatagccgcagtaagctcaataccatttgcgctcagcggcggctggatatatggcccacggctgaagctgctcatcggcagatcaaagaacggtgctaacggacgcagaatgctctccagcgggacaaactcgccaaacggcaccagatggtttttgttatagcgatcggcactttcgtagctgtacggcgcacctttacccagcgtgatgatggtgttgtaggtatcgtagcggttctgcttattgagacgcgcgtcgacaatcccggttaccaggctgctacctttatcacgcaactcaccgtccagtgctttgaggaacggttgctgattaatttccagatcggttatcgcgctctccggccagataatcaagctacttttgcccatcagcggtgccgttgcgttgtagtaaatcttcagcgtattaagaagctggccttcgtcccatttcaggctttgcggaatatcgccctgaaccatgctaacctgaatggttttctccggttgtggggtaaaccactggatgtaacgcagcgggaagggaagggcaaacagcacgacggccaccaccagcggacgccagttgcgtttgaccaacgccagtgccagcaggccactaaccatcatcagcaggaagttaatggcttccacgcccattatcggtgccagcccttttaacgggccatcaatctggctatagccgaactgtaaccacgggaagccggtcagtacccaaccgcgcagaaactcggtcacttgccagagggcaggggcggcaatcgctacgcgcagccaggtggttttcggccacagacggctcagcacgccagcaaacagtccggtatacaggctcaaatacgccgccagcagcaccaccaggaagatgttaaccgggccaggcattccgccaaaggtcgcgatgctgacatagacccagttaataccgctgccaaagaggccaaatccccagcaaaagccaatagcggcagactggagtggacggcggttaaaggtcaacgcctgaagccccatcaggctaataatcgccgcaggccagacgtcgtaaggagagaaggccagcgttccgcaggcaccgaataataacgccagcagcaggcgaatgcgctggcgttcaattaaactggcaaaagccatgtagttatctatccagtttcggttttattcatccagcttcggctggggactgtcatccgggattttgacatgaacctgaataatacgccgactgtcggccatcgccactttgaactggtaaccgtcgatgtcgatagtttcgccacgcgccggaagatgcccaaatgcctgcatcaccagaccaccgatagtgtcgacttcttcatcgctaaagtgggtgccgaacgcttcgttgaagtcttcaatggaagccagtgcgcgtacggtccaggtatgacgactcagctgacggaagtcgatatcatcttcttcgtcatactcgtcttcaatctcaccaacaatcagttccaggatgtcttcaatggtcaccagaccggaaaccccaccgaattcgtcaataacgatcgccatgtggtaacgctgagagcgaaactctttcagcatccggtctacgcgcttactttcaggaacgacaaccgcctgacgtaacactttgtccatgctgaaggcttcagcatcgctgcgcataaacggcagcaagtctttcgccatcagaatcccttcaatgtgatctttgtcttcgctaatcaccgggaaacgactgtgggcggactcgatgatgacatcaagacattcgtccagcgtctggttgcgtttcagggtaatcatctgggagcgggggatcatgatgtcgcgaacgcgttggtctgcgatgtccatcaccccttcgagcatatcgcgcgtatcttcgtcgataaggtcgttctgcccggaatcacggatcagcgccagcagttcgtcacggtttttcggttcaccgtggaaaagttggctgagtaacagggagaaaaatcccttcttgttgcttatcgtgtcactactgtgactattgtcgtcgctcatggcgtcgtatgggttctcatgttagttaatcaaaacgccgtcgttaatcaccaacggcggggacgtctgccagtcaaatgcctggcaaattattctttctcggcaatgtacggatcctcatagcccagagcaagcataatctctgtttcgagggcttccatttcttctgcttcgtcatcttcgatgtgatcgtaacctaacaaatgcagactgccgtgcaccaccatatgcgcccagtgcgcctccagtggtttgccttgctcctgagcttccttctcaaccacctgacggcagataaccagatcgcccagtaggctcatttccatgccaggcggcacttcaaacgggaaggagagcacgttggtcggcttatccttaccgcgataggtcagattcagactgtggctttcggcggtatcgaccacgcgaatcgtcacttcgctttcttcctgaaactgcgggatcaccgcattcagccatgtctgaaactggctctcttccggtaacccggaattatcttcacatgccagttgtaaatcgaggatcacctgactcatttttgttcctgttcttcgcgcttgcgttctgctgccagcgccgcttttcgtttttgttcggcttcttcccaggcttcataggcgttaacgatacgcgccaccacagggtgacgaaccacgtcttcgctgtggaagaagttaaagctgatctcttcgacatcggccagcacttcgatggcgtgacgtaagccacttttagtattacgcggcaggtcgatctgtgtgacgtcgccggtgataaccgctttactgttaaaaccgatacgggtcaggaacatcttcatctgttcgatggtggtgttctggctctcatcgagaatgataaacgcgtcgttcagcgtacgaccacgcatataggccagcggtgcgacttcaataacgttgcgctcaatcagtttctcgactttctcaaagcccagcatttcaaacagcgcgtcgtacagcgggcgcagatacgggtctactttctggcttaaatcgccaggcaggaagcccagtttctcaccggcttctactgccggacgagtcagcagaatacggcgaatttcctgacgctccagggcatcaactgccgcagccactgccaggtaggttttacccgtacccgccgggccaacgccgaaggtaatgtcatggtcgagaatattggcgatgtactgcgcctggtttggcgtgcgcggcttaattacgccgcgtttggttttgatattgaccgctttgccgtactccggcacgctctccgcgctttgctccagtacccgcgcttctttaatcgcaaggtggatctgttccggttcgatatcctgaatctgaccgcgcatcggggcagtatcgacatacaggctacgcagaatgtctgccgcagcggtgacgcaaatcggacggccggtcagtttaaagtggttatcgcggcgattgatctcgatgccgagacggcgttcgagctgcttgatgttgtcatcaaacgggccgcacaggctcaacagacgcgcattgtctgctggctccagggtgatttcgcgagtgtctatgttcaaaccgttcctcttatctgtatgccgccggaagctgaacattcaccggcctataaggaaattattcacgccacaggaaaaaggcgcaagcattgcaataaagatggggataaagagagaaaaaacaaggcccaccggaacggcaggcctgagaattacggctgataataacccacgccaaggtcgttttctttgcgggtacgggcaatcacactttccggtgtttctgccacgcgcagacccatttcatcttcagtacgcaccactttaccgcgcagagagttcgggtagacgtcggtaatttctacatcgacgaatttaccgatcatatccggcgtgccttcgaagttgaccacgcggttattttccgtacgcccggaaagctccatgatgctcttacggcttgtaccttctaccagaatacgctgggtggtgccgagcatccggcggctccacgccatcgcttgctgattaatgcgctcttgcagaatatacagacgctgcttcttctcttcttccggaacatcatcaaccatatcggcggctggtgtacccggacgtgcagagaagataaagctgtagctcatgtcgaaattgacgtcggcaatcagcttcatcgttttctcgaagtcttcggtggtttcgccagggaagccaacgatgaaatcagaactgatctgaatatctggacgcgccgcacgcagtttacggatgatcgctttgtactccagcgccgtatgggtacggcccatcaggttcagaatgcgatcggaaccgctctgtaccggcagatgcaggaagctcaccagctccggcgtgtcgcgatacacttcgatgatatcgtcggtgaattcgatcggatggctggtggtaaagcgaatacgatcgatcccgtcgatcgcagcaaccagacgcagcagatcggcaaagcttccggtggtgccgtcgtagttttcaccacgccaggcgttcacgttctgaccgagcaggttgacttcacgcacgccctgagccgcaagctgggcaatctcaaacagaatatcgtcggacggacggcttacctcttcaccacgggtgtaaggcaccacgcagtaggtgcaatatttattgcagccttccatgatggagacaaacgcggtcggcccttcggcgcgcggttccggtagacggtcaaacttctcgatttccgggaagctgatatctacaaccgggctgcggtcgccacgcacggagttgatcatctccggcagacggtgcagcgtttgcggcccaaaaataatatcgacatagtgggcgcgctggcgaatgtgctcgccttcttggcttgccacgcagccaccgacgccgataatcaggtctggattcttctcttttaacagtttccagcgacccaactgatggaagactttttcctgagccttctcgcggatactgcaggtgttcagcagcagcacatccgcttcttccgccacgtcggtcagttgatagccgtgggtggcatccagcagatcggccatcttgctactatcgtactcgttcatctgacagccccaggttttaatatggagttttttggtcatcgacttgctcttgcgaaatagtagccaggaatgcagggcgcatagtgtaatgctttgctgccgttgtgaccagtatgagcgttatcagcccttaggggtaaaaatcctgtaaacttaaagcatattgctaacaggatgattgaccatgacaaatcaaccaacggaaattgccattgtcggcggaggaatggtcggcggcgcactggcgctggggctggcacagcacggatttgcggtaacggtgatcgagcacgcagaaccagcgccgtttgtcgctgatagccaaccggacgtgcggatcagcgcgatcagcgcggctagcgtaagtttgcttaaagggttaggggtctgggatgcagtacaggctatgcgttgccatccttaccgcagactggaaacgtgggagtgggaaacggcgcatgtggtgtttgacgccgctgaacttaagctaccgctgcttggctatatggtggaaaacactgtcctgcaacaggcgttgtggcaggcgctggaagcgcatccgaaagtaacgttacgtgtgccaggcagcctgattgcgctgcatcgccatgatgatcttcaggagctggagctgaaaggcggtgaagtgattcgcgcgaagctggtgattggtgccgacggcgcaaatagccaggtgcggcagatggcgggaattggcgttcatgcatggcagtatgcgcagagctgcatgttgattagcgtccagtgcgagaacgatcccggcgacagcacctggcagcaatttactccggacggaccgcgtgcgtttctgccgttgtttgataactgggcaagcctggtgtggtatgactctccggcgcgtattcgccagttgcagaatatgaatatggcacagctccaggcggaaatcgcgaagcatttcccgagccgtctgggttacgttacaccgcttgccgctggtgcgtttccgctgacgcgtcgccatgcgttgcagtacgtgcagccagggcttgcgctggtgggcgatgccgcgcataccatccatccgctggcggggcagggagtgaatcttggttatcgtgatgtcgatgccctgattgatgttctggtcaacgcccgcagctacggcgaagcgtgggccagttatcctgtcctcaagcgttaccagatgcggcgcatggcggataacttcattatgcaaagcggtatggatctgttttatgccggattcagcaataatctgccaccactgcgttttatgcgtaatctcgggttaatggcggcggagcgtgctggcgtgttgaaacgtcaggcgctgaaatatgcgttagggttgtaaccttacaacattgccggatgcgtgccaaccgtaggtcggataagacgcggcagcgtcgcatccgacattgaaggataagacgtgtcaacatcgcattcgacattgaatgaacgcagaaaagcaaaaagctcgccgaagcgagcttttttaatgtggctggggtacgaggattcgaacctcggaatgccggaatcagaatccggtgccttaccgcttggcgataccccaactgggtgcacttacaaggtaagcgtcttgaataaattggctggggtacgaggattcgaacctcggaatgccggaatcagaatccggtgccttaccgcttggcgataccccaacaaattggttttgaatttgccgaacatattcgatacattcagaatttggtggctacgacgggattcgaacctgtgaccccatcattatgagtgatgtgctctaaccaactgagctacgtagccagattgtttcttcgatggctggggtacctggattcgaaccagggaatgccggtatcaaaaaccggtgccttaccgcttggcgataccccaataaccgggcggtgaaccgcttactcgaagaagatggctggggtacctggattcgaaccagggaatgccggtatcaaaaaccggtgccttaccgcttggcgataccccatccgtacaacgctttctggtgaatggtgcgggaggcgagacttgaactcgcacaccttgcggcgccagaacctaaatctggtgcgtctaccaatttcgccactcccgcaaaaaaagatggtggctacgacgggattcgaacctgtgaccccatcattatgagtgatgtgctctaaccaactgagctacgtagccatcttttttttcgcgataccttatcggcgttgcggggcgcattatgcgtatagagccttgcagcgtcaacctctttttcaaggaaaattgctcgaaagtgactgtttggttaggttgcgaacagcgtggcgctatattcgtcaattattgtttactttgtgttttttcccaccctacagccattcttttgtcatacaggatgaaattcggaatttaacaatagtggtgggaaattaatctatgaaatactggcctacagtgatgagttgtcaaacagtgatgtggcaaacccggaacatttccttactgcatatcagaatcaacaagcacctcaataactgaaacagccccggatttcaccggggctgtttcgcatttcttacttatacgcgctctggtgaacaccaaccgcgcgaccagacggatcgtccattttcttgaacgcttcatcccattcgatcgctttagcggaagaacaagcgacggaaggaccgcccggcacgcactcagcggcgctcggaagcgggaatagttcttcaaagatctcccgatacaagtacgcttctttagaggttggcgtgttgtacgggaagcggaagcgggcagtttccagttgctgatcagaaacctgctgcgcagccacttctttcagggtgtcgatccaactgtaaccgacgccatcggagaactgctctttctgccgccaggccacgcttgcaggcagatacgcttcaaaacattcacgcaggatgtgtttttccattttgccgttaccgcacattttatcctgtgggttaatacgcatcgccacatcaaggaattttttgtcgaggaacggaacgcgtgcttccacgccccaggcactcatcgctttgttggcacgcgcgcagtcatacatatgcagggccagcagtttacgcaccgtctcttcatgcagttctttggcattcggtgctttgtggaagtaaagataaccgccgaacacttcatcagaaccttcaccggacagcaccattttaatgcccatcgccttgatcttacggctcattaaatacatcggtgtactagcgcgaatagtggtcacatcataagtttcgatgtggtaaatcacgtcgcggatggcatccagaccttcctgtacagtgaagtgaatttcgtgatgcaccgtgcccagatggtttgccacttcctgggctgctttcagatccggactacccggcagacctacagcaaaggagtgtaactgcggccaccaggcttcagagcgttcctgatcttccacgcgacgggctgcgtatttcttggtgatagcggaaataatactggaatccagaccaccagaaagcagcacaccgtaaggcacatcagacatcagatggcttttaacactatcttccagtgcctgacgcagctcgtttttgtcggtcacgttatctttcaccgcatcgtagtcgaaccagtcgcgatgatagtaagaacggatttcgccgtcctggctccacaaatagctccccgccgggaactctttaatcgtgcggcaaactggcaccagcgctttcatttcactggccacatacagctgaccgtgttcgtcataccccatatacagtgggatgatccccagatggtcgcgaccaatcaggtaggcatctttttcgctgtcgtacagtgcaaaggcaaacatgccctgcaagtcgtcgagaaattccggccctttttcctgatacagcgcgaggatcacttcacagtcagacccggtctggaactggtaacgatcgccatattcggcgcgcaatgcctggtggttgtagatttcaccgtttaccgccagtacgtgggttttttgttggttgtagagaggttgcgcccccgcgttaacgtcaacaatactcagacgttcgtgggcgagaatggcgttatcgctggcataaataccggaccagtccgggccacgatgacgcatcaggcgactcagctcgagggctttcttacgcagctcaactgcgtctgttttgatatcgaatacgccaaaaatactacacataaccttctccgttaacctggtatttgttgcttgttgtgtttgcttgtttaaaaaaatgccgcaaagcagcactgtgcgcaagcgatttggcggtgaaaaaataaaaaacgtaatggtgattgtcgattggtgaaaaaaggtctggtgtgaggatatatttattgatgaatcgataatttttagcgggttttattgaatgtttatattttacgggggccaaattgctgacaaagtgcgatttgttcatgccggatgcggcgtgaacgccttatccggcctacaaaagcatgaaaattcaatatattgcaggagctgcgtaggcctgataagcgtagcgcatcaggcagtttggcgtttgtcatcagagccaaccacgtccgcagacgtggttgctattcagataacgtcgatttcagcgacactcgggtaaatccagctggggcggaaaggcatactgtcgatatcgtcgaggctgctaacaccagaaagcaccagaatcgtctccagacctgcctggaagccggccagaatatcggtacgcaggttatcgccgacaatcaccgtttcttcgctatgcgcctgcattttgtttaatgctgcgcggatgatccacgggctgggcttaccaacatagaacggtttgcgcccggagattttctcaatccctgcacacaacgcgccacaagcgggataaaaaccgcgcccgtgggtgtccggattggtggcgataaaacgtgcaccgttagcgacgaaataggctgctttatgcatcatgtcccagttgtaggaacgcgtttcgccaacaatcacgaaatcagggttcacatcggtaatagtgaaaccggctttgtacagttcatgaatcagtgcgccttcgcccaccacatacgctttcttgccttcctggcgacgcaggaaatcggcagtcgccatcgcagaggtataaaacacgctgtcaggtacatcgacacctgcggtggcaaagcggttcgccagatcttgcccagtctggctaggatagttggtcagcaacaccagcggcaggcctttatccataatcccgtgcaaaaattccgctgcacccggtacggcgacgttatcgtgcatcagcacgccgtcgatatcgcaaattacatttttaatggtcatggactacccagaatattgacaacaataagcgccactataaaagcacattaattttccagcaaatgctggagcaaaataccgttgagcatggcgcgttttaccagcgcaaaagcgccgattgcgctgcggtgatccagctcagaacgtaccaccggcagattagtgcgaaacgccttcagcgcctgggtattaatgcagctttcaatagcagggagcagcactttatcggcttcggtgatttcaccggcaataacaattttttgcggattaaataagttgatagcaatggcgatggttttacccagatgacgaccgacatactcaattacttcgctcgccagactatcgcctttgttcgcggctttgcagatagttttgatggtgcagtcgtccagcggcacgcggctctggtagccctgctttaacagattcaacacccgttgttcaatggcagcgttggcagcgatagtttccaggcagccaaagttgccgcagtggcagcgttcacccagcggttcgacctgaatatggccaatttcaccgacgttgccgttgcggccaataaaaatgcgcccgttagagataatcccggccccggttccgcgatggacacgcaccagaatggagtcttcgcaatcctgacttgcaccgaagtagtgctccgccagcgccagactacggatatcgtgaccaacgaaacaggtcactttaaaacgttcttccagagcttctaccagcccccagttttctacctgaatatgcggcatgtaatgaattttgccgctgtccgggtcaacaagccctggcaggatcacgctaatcgcgatcagctcgcgcagtttgcgctggtagctatcaataaactgagcaatggcattcaacagggcatgttccagcgtttgctgggtacgttccggcagcgggtaatgttcttctgccagcactttgctgctgagatcaaacagagtgatggtggcgtcatgacgaccaagccgtacgccgattgcgtggaaattgcgggtttcggtgacgatggagatagcgcggcggcccccggtggaggcctgctgatcaacttctttgatcagcccgcgttcgataagctgacgcgtaattttggttacgctggcgggggcaagctggctttgctcggcaatctgaatccggctgattggcccgtactggtcaatcaggcgataaaccgccgcgctgttaagctgttttacgagatcaacattacctatctgagcttgtccgcctggtgtcatactttctcttattgagttacgacctcgttaccgttaacgatggtcttggtgattttaaaatcaggtgtgaatgcagtcaggttggctactttacctgcggcgagtgtgccgagacgtttctcaacgccaatcgcacgcgccggatagagcgtcgccatacgtagcacttcatccagtgcgataccgcaatgttcgaccagattacgcacgccttcaatcatggttaaggaactaccgcttaacgtaccgttctcatccacacaaagtccgttacggtagtatattgttttacccgcaaaaatgaactgttcaatgttggcacctgctggcgcggtggcgtcagtaaccagacacagtttgtcgcctttcagacgtttagcgttgcgaatgttggcgtaatcaacatgcaggccatcagcaataataccgcaataaatgtcagcttcgtcgaggatcgcgcccgccaggccaggttcacgaccggtaatatacggcatcgcgttgtacagatgggtggcaaaggtaatccccgcgcggaaaccggcttttgcttctttcaacgtcgcgttggagtgaccggcagaaaccacaatcccggcatttgccagtttgctgatgacttccgcaggaaccatttccggtgccagggtcactttggtaatgacgtcggcgttttcacacaggaaatcgaccagcgcggcatcaggcttacgcacaaaattcggattatgggtgcctttttttaccagattcagccacggaccttccagatgcagacctaacgcctgattcggatgttttgccaggtactcgcgcataacgcgcacgccctgtttcatcagctcatcgctggtggtgataagcgtcggcagatagttagtacagccacttttctcattggctttctgcatgatttccagcgtttccacgctgaccgcttcagcggtgtcgttaaactgtacgccgccgcagccgtttaactgcacatcgataaaaccgggggagagaatggccccgttcagactacgttgttcgatctctggcggcagttccgctaccggacagacgcttttaatcaggccatcagcgataacaaccgcgtggtcatcaagaaattcgtggccggtaaagatccggccctgggttaatgcatacattctgacccccgattttaaaaaatattgccctgagcaaggagccagggcagggataacaattacagacctttgatattttctgcttctaattcattgaaatatcttaaagtcttaactttcagctccatggtggaaggttcatcgcacaccatgatcgctttcggatgcagttgcagacagctgatggtccacatatggttcacgcaaccttcaacggcggcctgcagcgccagtgctttctggctacccagcaccagaatcatcacttcttcggcatccagcagtgtaccaacaccgacagtcagggcatattttggcacctgattaacatcgttatcaaagaaacgagagtttgcgacgcgagtgtcatgagtcagggttttgatacgagtacgagaagccagagaagacgccggttcgttaaatgcaatatgaccgtcgttacctacaccgcccataaacagatgaatttttccgtaagaacggattttttcttcatactggcggcactcggcgtcgatatccggggcgttgccgttgagaaggttgatgttttctgctggaatatcaacgtgatcgaagaaattacggtgcataaagctgtagtagctttccggatgctctttcggcagaccgacatattcgtccatgttgaaggtgacaacgtgcttaaagctgacctggcctgctttatgcatttcgactaacgctttataggtggtcatcggcgtgccgccagtcggcaggcccagtacaaacggacgatcggcagtcggtttgaacgcattgatacgattgacgatatggcgagcagcccatttgccgacctgttcagcggtagtcagggggatcagtctcattattcacctcaataagtaaaatgtaagccgttggcggattaggcatctttaagcgtaacctggatttgcgcagacaggcgtcaatccgacctgattttttgaatgataaaataagttttctggtttagccagtaaaagggagtgataataacgatatttggtgacaaaactcacaaaagacacgcgtttaatttgcgatacgaattaaattttcacacactctgtagcagatgatctaacaatctgattacagaacatcggcagtacaatttgcagcaaaataaaaatacggcttgaaacgagccaaatagggttctcgtagggggaataagatgaatattttaggttttttccagcgactcggtagggcgttacagctccctatcgcggtgctgccggtggcggcactgttgctgcgattcggtcagccagatttacttaacgttgcgtttattgcccaggcgggcggtgcgatttttgataacctcgcattaatcttcgccatcggtgtggcatccagctggagcaaagacagcgctggtgcggcggcgctggcgggtgcggtaggttactttgtgttaaccaaagcgatggtgaccatcaacccagaaattaacatgggtgtactggcgggtatcattaccggtctggttggtggcgcagcctataaccgttggtccgatattaaactgccggacttcctgagcttcttcggcggcaaacgctttgtgccgattgccaccggattcttctgcctggtgctggcggccatttttggttacgtctggccgccggtacagcacgctatccatgcaggcggcgagtggatcgtttctgcgggcgcgctgggttccggtatctttggtttcatcaaccgtctgctgatcccaaccggtctgcatcaggtactgaacaccatcgcctggttccagattggtgaattcaccaacgcggcgggtacggttttccacggtgacattaaccgcttctatgccggtgacggcaccgcggggatgttcatgtccggcttcttcccgatcatgatgttcggtctgccgggtgcggcgctggcgatgtacttcgcagcaccgaaagagcgtcgtccgatggttggcggtatgctgctttctgttgctgttactgcgttcctgaccggtgtgactgagccgctggaattcctgttcatgttccttgctccgctgctgtacctcctgcacgcactgctgaccggtatcagcctgtttgtggcaacgctgctgggtatccacgcgggcttctctttctctgcgggggctatcgactacgcgttgatgtataacctgccggccgccagccagaacgtctggatgctgctggtgatgggcgttatcttcttcgctatctacttcgtggtgttcagtttggttatccgcatgttcaacctgaaaacgccgggtcgtgaagataaagaagacgagatcgttactgaagaagccaacagcaacactgaagaaggtctgactcaactggcaaccaactatattgctgcggttggcggcactgacaacctgaaagcgattgacgcctgtatcacccgtctgcgccttacagtggctgactctgcccgcgttaacgatacgatgtgtaaacgtctgggtgcttctggggtagtgaaactgaacaaacagactattcaggtgattgttggcgcgaaagcagaatccatcggcgatgcgatgaagaaagtcgttgcccgtggtccggtagccgctgcgagtgctgaagcaactccggcaactgccgcgcctgtagcaaaaccgcaggctgtaccaaacgcggtatctatcgcggagctggtaagcccgattaccggtgatgtcgtggcactggatcaggttcctgacgaagcattcgccagcaaagcggtgggtgacggtgtggcggtgaaaccgacagataaaatcgtcgtaagtccagccgcagggacaatcgtgaaaatcttcaacaccaaccacgcgttctgcctggaaaccgaaaaaggcgcggagatcgtcgtccatatgggtatcgacaccgtagcgctggaaggtaaaggctttaaacgtctggtggaagagggtgcgcaggtaagcgcagggcaaccgattctggaaatggatctggattacctgaacgctaacgcccgcagcatgattagcccggtggtttgcagcaatatcgacgatttcagtggcttgatcattaaagctcagggccatattgtggcgggtcaaacaccgctgtatgaaatcaaaaagtaatctgctttatgcctgatgcgacgcttgagcgtcgcatccaacaatgacaagcggtggagatcttctctgccgctttttttttcatcaatcatccccataatccttgttagattatcaattttaaaaaactaacagttgtcagcctgtcccgcttataagatcatacgccgttatacgttgtttacgctttgaggaatccacgatgagtgaggcagaagcccgcccgactaactttatccgtcagatcatcgatgaagatctggccagtggtaagcacaccacagtacacacccgtttcccgccggagccgaatggctatctgcatattggccatgcgaaatctatctgcctgaacttcgggatcgcccaggactataaaggccagtgcaacctgcgtttcgacgacactaacccggtaaaagaagatatcgagtatgttgagagcatcaaaaacgacgtagagtggttaggttttcactggtctggtaacgtccgttactcctccgattattttgatcagctccacgcctatgcgatcgaactgatcaataaaggcctggcgtacgttgatgaactgacgccggaacagatccgcgaataccgcggcaccctgacgcaaccgggtaaaaacagcccgtaccgcgaccgcagcgttgaagagaacctggcgctgttcgaaaaaatgcgtgccggtggttttgaagaaggtaaagcctgcctgcgtgcgaaaatcgacatggctagtccgtttatcgtgatgcgcgatccggtgctgtaccgtattaaatttgctgaacaccaccagactggcaacaagtggtgcatctacccgatgtacgacttcacccactgcatcagcgatgccctggaaggtattacgcactctctgtgtacgcttgagttccaggacaaccgtcgtctgtacgactgggtactggacaacatcacgattcctgttcacccgcgccagtatgagttcagccgcctgaatctggaatacaccgtgatgtccaagcgtaagttgaacctgctggtgaccgacaagcacgttgaaggctgggatgacccgcgtatgccgaccatttccggtctgcgtcgtcgtggttacactgcggcttctattcgtgagttctgcaaacgcatcggcgtgaccaagcaggacaacaccattgagatggcgagcctggaatcctgcatccgtgaagatctcaacgaaaatgcgccgcgcgcaatggcggttatcgatccggtgaaactggttatcgaaaactatcagggcgaaggcgaaatggttaccatgccgaaccatccgaacaaaccggaaatgggcagccgtcaggtgccgtttagcggtgagatttggattgatcgcgccgatttccgcgaagaagctaacaagcagtacaaacgtctggtgctgggtaaagaagtgcgtctgcgtaatgcttatgtgattaaggcagaacgcgtcgagaaagatgccgaaggtaatatcaccaccatcttctgtacttatgacgccgataccttaagcaaagatccggcagatggtcgtaaagtcaaaggtgttattcactgggtgagcgcggcacatgcgctgccggttgaaatccgtttgtatgaccgtctgttcagcgtgcctaacccaggtgctgcggatgatttcctgagcgtgattaacccggaaagcctggtgatcaaacagggctttgctgaaccgagcctgaaagatgcggttgcgggtaaagcattccagtttgagcgtgaaggttacttctgcctcgatagccgccattctacggcggaaaaaccggtatttaaccgcaccgttgggctgcgtgatacctgggcgaaagtaggcgagtaattttaagtttcgctatgccggatggggcgtttacgtcgcatccggcaaggaacagacaaacagtttcaaacgctaaattgcctgatgcgctacgcttatcaggcctacatgatctctgcaatatattgagtttgcgtgcttttgtaggccggataaggcgttcacgccgcatccggcaagaaacagcaaacaatccaaaacgccgcgttcagcggcgttttttctgcttttcttcgcgaattaattccgcttcgcaatttatccataaaataaatttaaaataacaaaacataattaaataaaatgtaaccgctttcatcttgctggaatttcacgcttttattcttctgcaagcctttcaaccgcaaacttaagccttgtaacaaaaatcatcaaaatatgtgcggttgctcatgttcttacattctggttacagaaagagattgataattcgcgtcgcgaaaaatagtctgttcctgtagtcagcgagacttttctcaacgctacttttttaatttttattttttcgctgttcacctttggtgcagcaatttatacgtcaaagaggattaacccatgcgtacgtttagtggcaaacgtagtacgctggcgctggctatcgccggtgttacagcaatgagcggctttatggcaatgccggaggctcgcgccgaaggattcatcgacgatagtaccttaaccggcggtatctattactggcagcgtgaacgcgaccgtaaagatgttaccgacggcgacaaatacaaaaccaacctttctcactccacctggaatgccaacctcgattttcagtccggttatgctgctgatatgttcggccttgatattgctgcgtttacggcgattgaaatggcggaaaacggcgacagctcccacccgaacgaaatcgcgtttagtaaaagtaataaagcctatgacgaagactggtccggcgacaaaagcggtataagcctgtataaagctgcggccaaatttaaatacggtccggtttgggcgagggcaggttacattcagccaactggtcaaacgctgttagcgccgcactggagctttatgccaggtacttatcagggggcggaagccggggcgaattttgattacggcgatgctggtgcgttgagtttctcctacatgtggaccaacgaatacaaagcgccgtggcatctggaaatggatgagttttatcagaacgataaaaccaccaaagttgattatctgcactcctttggggcgaaatacgacttcaaaaataacttcgtactggaagcggcatttggtcaggcggaagggtatatcgatcaatattttgccaaagccagctacaaatttgatatcgccggtagcccgttaaccaccagctaccagttctacggtacccgagataaagttgacgatcgcagcgtcaacgacctttatgacggcaccgcctggctgcaagcgttgacctttggttaccgggcggctgacgtagtggatttgcgcctcgaaggcacctgggttaaggctgacggtcagcagggatacttcctgcaacgtatgactccaacctacgcttccagtaacggtcgcctggatatctggtgggataaccgttctgacttcaacgccaacggcgaaaaagcggtcttcttcggtgcgatgtatgacctgaaaaactggaatcttccaggcttcgccatcggcgcttcctacgtttacgcatgggatgctaaacctgcgacctggcagagcaatccggatgcgtactacgacaaaaaccggactattgaagagtctgcctacagcctggatgcggtctataccattcaggacggtcgcgccaaaggcacgatgttcaaactgcatttcaccgaatacgacaaccactccgacatcccaagctggggcggtggttacggcaacatcttccaggatgagcgtgacgtgaaatttatggtaatcgcaccattcaccatcttctgatgcccgacgcggcaggttttgtgcctgccgcacgtttgaggaatttgctatgaaaaaactgattctcatcgccataatggcaagcgggctggtagcttgtgcgcaaagtaccgcgccacaggaagacagtcgtctgaaagaggcatacagcgcctgtatcaacaccgcacaaggtagcccagaaaaaattgaagcctgccagagcgtgttaaacgtgctgaagaaagagaaacaacatcagcagtttgccgaccaggaaagtgtacgcgtactggattatcagcagtgtctgcgtgcaacgcaaaccggaaatgatcaggcggtgaaagccgattgtgataaagtctggcaggaaatacgcagtaataacaaataagtgagagctgtaactctcgcttttcttatttcccttgcataaaaaagccaacccgcaggttggcttttctcgttcaggctggcttatttgccttcgtgcgcatgttcatcttcgcggcaatcgccttcggcacagtgaccgtaaagatagagactgtggttagtcaggcgaatgccatgttttgcggcaatttcacgctgacgcgcttcgatggaatcatcactaaattcgataaccttgccgcagtcgaggcagatcaggtgatcgtggtgatgttgctgtgtcagttcaaatacggatttaccgccttcaaaattgtggcgggtgacgataccagcgtcgtcaaactggttcagtacgcgatataccgtagccagaccaatttcttcacccatatcgatcagacgtttgtataaatcttccgcactgacgtgatggttgtccggctcctgaagaacttccaggatttttaaacgaggaagcgttactttcaggccagctttctttagggcggtattgttatcagtcatgcggaatctgtcctgttactaagcggttcacttcattagaagaagtgacagaatttgctcttgagataatgcgtatcattatagaattgccacgcctaaatgaaaaccacaagtccctggcaaatattgttaataaaaacgtggcacagcttacatttacaacggcaaggccacttgaacaccgggacattgtacaggtacaacagcaaaagttacaaatttgtagcaattattttgattggcattatctattaatacggcgtagacatgagtctacgccgcatcacatcaggcattgagaatttcgtcgagatgcaactcttcagaaatctgtttaacccatttttctacacgttcagcggtcagttccggctgacggtcttcgtcgatagccagaccgacaaagtggtcgtcatctgccagacctttacttgcttcgaaatgatagcccgcagttggccagtgaccaacgatggttgcaccgcgcggttcaatgatgtcgcggatggtgcccaatgcgtcgcagaaatattcggcgtaatcttcctggtcaccacaaccaaacagcgcaaccagtttgccgttgaaatcaatctcttcgagagtcgggaagaagtcatcccagtcacactgcgcttcgccgtaataccaggttgggatgcccagcagcagaatgtcataagcttccagatcttctttgctgctttttgcaatgtcatggacatcggcaacgtctttaccaagctgtttttgaatcatttttgcgatattttcggtattaccggtgtcgctgccgaaaaagatgccagtgatagccatgagtgaaataacctcttgaaacttattgaaatgggggtggaaaattgcccacggataaaggcaatcatagcagaacaggcagtcttgcggaatcagcaaacgagcaggactgcacactgtgctacatgaaagtggaaatttaaacgatgccctgactacgcagcgccgccagttgctgcattaacatctcttcgatcagttcgctacggctcatattgcggctctccgccagctcgttcagcgcctcgacagcttccgcgttcagcttcagttcgacacgcttaaggccacgtactttgtcgcgttttagctggttgcgtttattaatacgcagctgttcatcgcggctaagcggattagttttcggtcgtcccggtcgacgctcgtgcgcgaacagatctaatgtcgtacggtccgtttgttctttggccatgatcttggtgacttcgggggaaacaatcagccaggcctctgcccggatggatagcgcgccataatacatcagcgcgatgagtcacgccaacgcccacgcgcggaaagcgacgcggacgctgggtttttaatcagttgcgttaatcattgagatagcgacggatagcgcgtaataccgcatccggtttttcagcatggacccagtgacccgcgcctgcaatcacatgcgcccgtgcctgtggaaattgagccagtaaatcatcacggtactgctcgctaacatacggagaattgccgccagggataaacagggcagggtgatcccatgccgggattttctcccaacctacaatatgcggatactgatcccacaataccggcacgttaaagcgccactccccgtcaacaaaagatttcagcagaaactgaatcaccccttcttcattaagatgctggcgcattattgctgctgcttgctggcgagtttgtgcgtcgctttcactgaccgcgttgatagccgcaaaaatctcatcatgacggcgtacgtgatagtcgaccggcgcgatatcgatcgccaccagtttatcgatgcgatcggaggctagtgcagtaagtgccattaccgctttaccgcccatggagtgaccgataaatgttgctttgtcgatctgctgtgcatccagagtatcaacaagatcctgcgccatcgccgggtaattcattaccggatctctcggactaagaccgtggttacgcatatcaacctggatgatattgtgatcgtttaccagatcgcgagccagtacgccaaggttgtcgaggctgccaaacagaccgtggacaagaacgatgggagaattattgtgctggttttgtgcagtttgcgcgcggatattcaatttcatggcaaagttctttttttcgcgttgtcgggttagggtattatgttgaccattgtgccacagggctgcaacaaataaggtttattccgagtttttctgcaagccaggcttgacgctatccgctgccgggatttattcatatactcctggcgacttgtattcagctaagacactgcactggattaagatgaaaacgattgaagttgatgatgaactctacagctatattgccagccacactaagcatatcggcgagagcgcatccgacattttacggcgtatgttgaaattttccgccgcaagtcagcctgctgctccggtgacgaaagaggttcgcgttgcgagtcctgctatcgtcgaagcgaagccggtcaaaacgattaaagacaaggttcgcgcaatgcgtgaacttctgcttagcgatgaatacgcagagcaaaagcgagcggtcaatcgctttatgctgctgttgtctacactatattctcttgacgcccaggcgtttgccgaagcaacggaaagcttgcacggtcgtacacgcgtttactttgcggcagatgaacaaacgctgctgaaaaatggtaatcagaccaagccgaaacatgtgccaggcacgccgtattgggtgatcaccaacaccaacaccggccgtaaatgcagcatgatcgaacacatcatgcagagcatgcaattcccggcggaattgattgagaaggtttgcggaactatctaaaacgttgcagacaaaggacaaagcaatggcaatccacaatcgtgcaggccaacctgcacaacagagtgatttgattaacgtcgcccaactgacggcgcaatattatgtactgaaaccagaagcagggaatgcggagcacgcggtgaaattcggtacttccggtcaccgtggcagtgcagcgcgccacagctttaacgagccgcacattctggcgatcgctcaggcaattgctgaagaacgtgcgaaaaacggcatcactggcccttgctatgtgggtaaagatactcacgccctgtccgaacctgcattcatttccgttctggaagtgctggcagcgaacggcgttgatgtcattgtgcaggaaaacaatggcttcaccccgacgcctgccgtttccaatgccatcctggttcacaataaaaaaggtggcccgctggcagacggtatcgtgattacaccgtcccataacccgccggaagatggtggaatcaaatacaatccgccaaatggtggcccggctgataccaacgtcactaaagtggtggaagacagggccaacgcactgctggccgatggcctgaaaggcgtgaagcgtatctccctcgacgaagcgatggcatccggtcatgtgaaagagcaggatctggtgcagccgttcgtggaaggtctggccgatatcgttgatatggccgcgattcagaaagcgggcctgacgctgggcgttgatccgctgggcggttccggtatcgaatactggaagcgtattggcgagtattacaacctcaacctgactatcgttaacgatcaggtcgatcaaaccttccgctttatgcaccttgataaagacggcgcgatccgtatggactgctcctccgagtgtgcgatggcgggcctgctggcactgcgtgataagttcgatctggcgtttgctaacgacccggattatgaccgtcacggtatcgtcactccggcaggtttgatgaatccgaaccactacctggcggtggcaatcaattacctgttccagcatcgtccgcagtggggcaaagatgttgccgtcggtaaaacgctggttagttctgcgatgatcgaccgtgtggtcaacgacttgggccgtaaactggtagaagtcccggtaggtttcaaatggtttgtcgatggtctgttcgacggcagcttcggctttggcggcgaagagagtgcaggggcttccttcctgcgtttcgacggcacgccgtggtccaccgacaaagacggcatcatcatgtgtctgctggcggcggaaatcaccgctgtcaccggtaagaacccgcaggaacactacaacgaactggcaaaacgctttggtgcgccgagctacaaccgtttgcaggcagctgcgacttccgcacaaaaagcggcgctgtctaagctgtctccggaaatggtgagcgccagcaccctggcaggtgacccgatcaccgcgcgcctgactgctgctccgggcaacggtgcttctattggcggtctgaaagtgatgactgacaacggctggttcgccgcgcgtccgagtggcacggaagacgcatataagatctactgcgaaagcttcctcggtgaagaacatcgcaagcagattgagaaagaagcggttgagattgttagcgaagttctgaaaaacgcgtaaacacatttaataaaaaaagggcggtcgcaagatcgcccttttttacgtatgacaaacacagaattgcctgatgcgctacgcttatcaggcctacgaggatggtgcaatatattgaatttaagcgattttgtaggccggataaggcgttcacgccgcatccggcaaaaacaacgaacactttgtcaacaaactgagtagctcaaggaaatcccaatgaagaccaacaggagtctggtcgtcatagtgagtctaattaccgccacattactgctgactgcatgcgcccaacctgaacaaagtagtttagctggcgactggttactgacccctaaagataaaaccagaggattaacgggtagcattgcggtaaatattgcacctttccggtgtaagacaaattgccgtggtgataacttacctgataatacccgccgctggcagttgagtggcgggaacgaaaaagaacttacttatcttcataatatgagtgcacaagaaaaggtcggtttaaatcccggttggcaatgctacaccagtttttttatgcgggtttgccagggcaagcccggcactcgaccgatagtcaatgaggattatgtcagcgaaagcggattttttggcagcatgatgcatgtcgggattattgagttacgacgctgccagagtgaaaattgccagcaagaattgaaagcgataaatacacattaaaatagtgagtccgggaatgaaacccggacctgaacatgtcttattgcgtgaatgtttctttcatttgatactgcatttcccagagttcagtaaggctaataacttttcttgttcttgcttcttcactttgtacccataagaaagggtagaacgtgaaggcttccgttgcgcttaattttattacgtcttctcgccattgctgccatcgtacattttcatagaaggtatctaaatcaccggataatgcccactgaagaaactcagaatatccaacttccagactttcccaattcagcgtatctggcgcaaaataataaacgcagccagtatcttccccaagatcgccaccattaagagcaaaaattacccctgcgacatcgtcagcgatgggtaaagcccgcacgcctgcgaattcagggcgttgtgtccaacttactggatctcgtggcaaccgggggtgaccagatcctgctatgcgtaattaaccattatcaatcagcagacctccggagccatagacaagcgcacccatcggactttttgttgtcacctgtaattgataaagtgcggtttcggctaaatctttattaaccggtaagagttcggtatggtttgtggcgtcttttaaccagttctggattattggccaggcactatcttcagtatttactaactgattcatttcacgcatcgctacttgctccttgtgtgctacggtgtcatttatgatgaggaattgtatggaacattttttaaatattaagttccttatatttgaataaaaaatgactttatccatacattgccacttttttcaaagcataaaccgatacccaataccggtttcagtaataaaatggcgaggccgggccggatcctgttccagtttttgtcgcagatgccccatataattacgcaaatagttgctgtgttcgatcgcgtttagaccctacatctgccggatgcggcataaataacgaactatttgccaacaaacagaaagggcgatcattcaatcgcccttttttactttgttttattaaccgtgtttatttttcagttcaaagcgtggacttaccagaccatacagtgtccaaccaaggaaggtcacgatggaaccgtacagcatggcttcttccccggaactgtacagcgcataaaagctatacatcgcgccaacaaaagcaacaaagtttgcaactttcgctttactggggggcacattagcgaccttctgaataatgactaatgccgccatactcagaatatacggaatgatattggtcaccacggccaggttaaccagcacgttgaactgactgtttaggctcgggctaatggtcatcagtgccaatccactctgaataatcacaatggtcaacattccctgcaccggtgcatccactttggttacacgggagaaaattttagggaagtagccttcatcagaactagatttaaacacctgggcaatggtgaactgccagccaagtaggctaccgcagcaggacatcaccatcagcgccataatgactttacccacttccggcgtgaacatctgcgcgaaggccagaccaaatggtgccgtactatttgccagctccatatttggcacaatcccggcaatcacgttggtggagacgatataaatcaccgccgcacctaacgtaccgccgagtaccgcgattggcacattacgttccgggttttccactacatcagtattcgcacacgcagactccagaccaagaaaagcccacagcgtcatagcgatggaagaacctaccgcactgaagaacggtgcatgatgcggattccaggaatcaacgtacagcgtcgggctaaaccagaaccagccaataatgcacagaccgacgaccggaataatgaccccccacacggtaatgctactgatttgcccggtaatgcgcgcaccaccaaagttagccacggtacaaatccacagcaccccgatggtcgcaagaccaatctgcactgggctcaaactcgcgccgagcagttcggtgccgtaaccaaccgcgctaatagcaatcgcgacgttagcaatcagcagactgacgccgtaggtatagttcgccataaagttaccggatttaccgaaagcatactcggcataaccgcccataccgccacttttacggctgaacataccgcattttgcgaatgcccatgccagtgccatactgcctacggctgtcaccagccaggagataatactgattgtcccgacttcggcaagctttgtcggcagcatgatgataccggagcccatcatgttgaccatcgtcagtatggttaactgaacgacgcccattttgttgcttttagcctgactcataatttttcccctttcaacagggtgctttgcgcatcacgaggcttgatgacatagcaccaaacttgcttacgaccatcatgttcttcgatatagacaccctgcagctccggtgcaaaacctggcagcaggttgatcccttcttccagagcgctgaagtaacgcagaacagcaccaccccagatttcacccggaacaacacacagcacacccggaggataaggaagcgcaccttcggcagcgatacggccttctgcatccggcagacgaaccagttccacttcaccgcgtaaataggcgtagttggcttcttgcggattcatgctgacgcgtgggaagtgctccttacggaacatctctttttgcagttgtttcacgttgtggcgggcatacaaatcatgcatttcctgacacaactgacgcagggtataaccggcgtagcgctcttcatgctgtttgtagatggaaggtagcacttctgctaatggcgcgtcggactcaagcagtttttcgaagcgtaccagcagggcaacaagttgctgaagtttggccatatcttctgccggagtcagcaggaagaggatggagttaagatcgcatttttccggcactacgccattttcgcgcaggaagttagcaagaatcgtcgcgggtacaccgaacgcttcatattcgccgttacgtgcatcaatacctggggttgtcagcaacagtttgcatggatcgacaaagtattgattctctgcatagccttcaaaagaatgccagtgttcccctggtacaaactggaagaagcgcagatcaaccgcaatttgcgctgtttcatagctctgccagggtttaccatccaccagttcaggtacgaacggacgaatatgctgacagttatcgaggatcagtttgcgggcattaatgccatttaccacacaatccatccacatattacgaccgctgacaccttcatgcattttggcgttgatattcagtgcggcaaacagcggatagaacgggctggtggaggcgtgcatcataaaggcgttgttcatgcgtttgtgcggtacataacgctgttgccctttgatgtggctgtcttttttatgaatttgactagtctgagaaaaaccagcctgttgtttatgcacagattgcgtaaccagaatacccggatcgttctcattaagatccagcaacagcgggctacagtccgccatcatcggaataaactgttcatagccgacccatgcactgtcaaacaggatgtagtcacacagatgaccaattttatccaccacttggcgggcgttataaatcgtaccgtcgtaggtgcctaactgaatcacagcgaggcggaaaggacgagcctcttttgcccgctgcggtgcgacttccgcgatcagctcacgcaggtaactttcttcaaaacagtgcgcatcaatgccaccgataaagccatacgggttacgtgccgtttccagataaaccggtgttgcaccagcctgtagcaacgctccgtggtggttagatttgtggttattgcgatcaaacagcaccagatcacccggtgttagcagggcgtttaaaaccactttgttagaagaactagtgccatttaaaacgaagtaggttttatcggcattaaacacttttgccgcatgttgctgtgcaatgcatggcgcgccttcgtgaatcagcagatcgcccatcgctacgtcggcgttgcacaagtcggcacggaacagcgcctcaccaaagtattccacaaactgattccccgccggatggcgacggaaaaattcgccgccctgatgaccagggcaatcaaacgcgctgttaccttgattgacataatcgaccagtgcgcggaagaaaggtgggcgcagttgagtttcataatggctggcagcggtttctaactggcgaccataaaattctcgtcggctttcgcaattctcaaagacaccgctaatacggggcaaatactctgcgggtacacgttcttgattttcagtagcaataaataccgggatgccataacccgtggcatcgatttcatcgagttttccgcatgtaacatcgttgaggcttaaaactattgccgccacatcgatattacgactttcattaatgtagatacattctcgctgcgtggtaaaacagtccgggcaagaatcactaaccgcaatttttaatttactcatttttcatctctttattttaggtaatagcaggtcctcaatttctcgaatgagaaatcgatcgtgccggaaaaaagcaaagttaccccgctgataaataaatcaggtagattgcttttttcagaatgcagaaacccttaccagtcaggtggctgataatacaagggttaacagagaatgagcactgcggaatacaggcatatgcctgtaatacagagagtcaggaagacctgtacgctgaagtgcccttagtcggtagactaacgggcattgaagaagtgaaagtcgaagctattgcgatgagcaaacttcataatatgagttgtccgccttatatggggcatagtgcggctgttattttccatttaatttacctttcctgatgtgaatgaaggtgaagatattctatccaggaaatacggttgaactgtgaaggtgatcaataaaaaatgatcaatcttaatttatttaatgatgagctttttactcagtaatataaaatattgaattgttatttttgtgtgttgtttaagataaaaagccgtatttattattacggctttaattaataaaaggcaggctgtattaaaattaatattcaaagcataaaccgatagccaataccggtttcagtaatgaaatggcgtgggcgggcgggatcctgttccagtttttgtcgcagatgtcccatataaatacgcaaatagtgactgtgttcgaccgcgtttggcccccacacctggttaaggagctggcgctgggtgagtacttttccggcattgttgagcagcaccgccagcaggcggaactcaattggtgtgagatgcacctcttcctcaccccggtgaatcacgcgggcggctaaatcgacggtaacatcggaaaattttaccagcggatcgggcgcggtggtggcagagtggcggcgtaatgcgacgcgcagacgggcctgcaattcgccaatgccaaacggcttactcagataatcatccgctccggcatccagcgcggcgattttgtcgctctcttcgctgcgtgcggaaagcacaatcaccggcaccgcgctccactggcgcaggtcgcggataaactcaatcccatcaccatcgggcaggccgagatcgagaataatcaaatctggcttacgggttgccgcttccagcaagccgcgttgcagcgtttcggcctcaaagacgcgcatcccgtcgccctccagcgccgtgcgcagaaagcgacgaatagcctgttcatcttcaacaatcagaacgtttgtcacatatcctcatgaaattcttcaagttcaggggcagtttgctggggaagtgtaacacgaaaacaggcaccaccttccggtcggttgaacgcggtaatagtgcccccgtgtacatccactatcgcccgacaaattgccagtccaagccctacccccggtactgcgctctctttattcccgcgagcaaacttatcaaatatcgtctgctcctggcctggcggaagaccggggccgttatcccagacatccagttgtagattttcgccctcaacgtgggcatcgataccaatttcggcctgcgcacccgcatatttcaccgcgttctccagcagattaatcagcacccgttcaaagagtggcccgtcaacgtggattaaggtcagcggttctggcagagaaagattgatggggctgcttaaacccggttccagcatttgcagcgcgctgccgactacttcttccagcgttaaccactctttcttcaaattaaagccgccggactgaattcgcgccatatccagtagattattcaccagtcgggtagtgttcagcacatgctgacggatctcgctggcctggcgggcgtggggacttccttcgcttgccagatcgagcgttaagatttctgcctgaccaaacagcaccgtaagcggcgtgcgtaaatcatggctaagcgccgccagcagggcgttgcggatctgttcacgttcgcttgccatccgcgcctgttcttcgctggcggttagcgtcagccgctcaagggcattggcgactaacagcgtaaacgtctccagcaggcgctgctgttccgggatcatcaactggcgcagattccccggctccaccaccaccagcccgtaggttttctcgccgctttttagcggcaaaatctggtacggtacaccgggtaacgtgtcggtgcccgcgcccgcaggcaggcctttatcaaaactccactgcgcgatggcatcgtcccacggcgtcattccttgcggatgtgttaacggctgcaatttaccgttgtcatcgggcaacaacacctgactgcgggcatgaaacgtggaggcaataaattgttcgctggtggcagcgatatcctgcggactgcggcccaccgccagagctttgctcatttcatataagtgccgtgtgcgttgctcgcggtaacgggctacccgcgcctgataacgcacgccagcagtaaggttcccgatcaccagcccgacggttaacatcaccgcgaaggtcagcagatattgcacatcagagacggcgagcgtgccgcgtggggcgataaaaaagagatcgaaactcactacattaatgacggtggcaaccacactaggccagcgtccataaaatagcgccaccaccaccacgccaagcagatacagcatcaccaggttggcggcatcaaacgccatcagccactgcatggcaattaaggtgataacggcgcataacgcggcggcaaccacgcatccctgaatttgtacacgccacttgtctttaaaagagcggttatccggcgcgttgttaatcgtgcgggcgggtggttcatcaagcgcgaccagcacctgatcgagatcgggggcgatgcgcgccagtcggtcagcaaacgtttcccgacgccaccagcggcggctggccgggcgaccgagaataatcttgccgagattatgttcacgggcataacgcactaccgctttctcttccgctggatcagaaagtgttgccgtctccgcgcccagttcctgcgccagacgtaaggcgctgagaattgcccgacgttttttttccggtaagcggtgcagggcaggggtttcaacatacaccgcgtgccagacgctacccagccgactcgccagccgcgccgctgcgcggaccagtttttcgctgccggtgttatggccgatgcataaaaggatcgcgtcgcgcgtgtgccacactttctcttcgccaggatgcccccgccaggcgcgcatttgctcatcaacgcgatcggcagtacggcgcagtgccagttcgcgcagggcgatcagattacctttgcggaaaaaatgttcaatggcgcgctccgcctgcccggcaatatagactttgccttctttcagccgctggcgcagatcgtccgggggcaagtccaccagcaccacgtcgtcggcggcatcgaaaaaaggatcgggcacggtttcccgtacctgaattccggtgacgccgctgaccacatcattcagactttccagatgctgaacgttgacggtagtgaaaacatcaatgccagcttccagcagttcttcgatatcctgccagcgtttgggatgacgggaacctggcgcattactgtgcgccagttcgtccattaagatcagcgccgggcggcgggcgagggcggcatcgagatcaaactcgctgatatgccgcccacggtacgcctggcgttttaacggcagaacagccagcccttccagcatggcggcggtatcttttcgcccgtgggtttctaccacgccaaccacaatatccagcccttgcgcccgcagtcgctgggcttctgccagcatcgcccaggtcttcccgacgcctgcacaggcaccgaagaaaactttcagcttcccccgatgcggcgcggcagtttgttccagcagacgatcggggtcgggacgtaagggttcgttattcatcaagtttatccagcgccagattgagttcaacaatgttgacaaccggctggccgatatatttcaccagcggttgttggctgtattttgcgatcagttgcgtgagctgttcaacgctgagattacgcgctttcgccacgcgtgggatttgccaggccgccgcttgcggggtgatattattgtccagcccgcttgcgcttgccgtcaccagttcaaccggaacgctcgcgctggcatccgggttagcggcccgtaatgcagcaacgcgtgcggctattagtttatccagctcagggttactgaccgccagattgctcccgccagaagcctgtggattatagggcatttctgccgttgcgctcgggcgaccatgaaaatagccgttgccggtaaaattctgcccgattaatgcgctaccgcgcaccgtatcaccttcacgaatcaagctaccattggcctgccagggaaaccaccattgccccagtacggtggtcagcagcgggtaaacgccgccagtaatcaataacagaaagataaatgtacttaatgccggacgtaatccactcatggtaaacctcacaccagaccgcaaacggtcagcagtaaatcaatgactttgataccgataaacggcaccagcagcccacccagaccgtaaatccataagttacggcgcaacatggcagaagcggtaagcggtttataactcacgccttttaacgccaggggaatcaaaaagacgataatcaaggcgttgaaaatcaccgcactgaggattgcggagtcggggctatgcaggcacatgatgttcagcgcatttaactgcggatacgttgccgcgaatgccgccggaataatggcgaagtatttcgccacatcgttggcaatgctgaaggtggtcaggctgccacgggtcatcagcatctgtttgccaatgtgcaccacctcgatcaacttggtcgggttagagtcgagatcgaccatattgcccgcctctttcgccgcctgggtgccggagttcatcgccaccgcgacatctgcctgcgccagcgccggagcatcgttggtgccgtcgccggtcatcgctaccaaacgaccttccgcctgatactgacggatcaatgccagcttggcctccggtgtcgcttcggcgagaaaatcatcgacacccgcttccgcagcaatcgcggcggcagtcagacggttatcgccggtaatcatcaccgttttaatgcccattttgcgcagctgggcgaagcgctctttaataccgcctttgacgatatctttcagcgcaataacgcccagcacacgagaaccttccaccaccaccagcggcgtggctccctgacgcgcaacctgatcgactttttgatcaacatcggtagggaagtgaccaccgttagcctcaacatggcgacgaatggcatcgacagaacctttacggatcatgcggttgtcgatgttgatcccgctcatccggctttgcgcagtaaacggtacaaaggtggcatggaggctctgcacatcgcgctcgcgcaggttaaaacgctgcttggcgaggatcacaatactgcggccttccggcgtttcatcagccaggctagccagttgtgcggcgtcagccagcgttttttcatccacgccctgcgcggggataaactcgctcgcctgacggttaccgagtgtgatggtgccggttttatccagtagcagaacgtcaacgtcacctgccgcttcaactgcacgtccgctggtggcaatcacattcgcgcctagcatccggctcatcccggcgacgccgatcgcactcaacaggccgccaatagtggttgggatcagacagaccagcagcgccaccagtaccgttacgctgactgcattaccgccccacgcggaaaacggccacagcgtggcggttgccagtaaaaagacgatagtcagggcaatcagcagaatggtcagggcaatttcgttcggcgttttgcgtcgctgtgcgccttccaccatcgcgatcatccgatccagaaatgtctcgccggggttaacgctacactcaatcaccagccagtcagaaagaatacgcgtgccgccggtgacggaggcaaaatcgccgccggattcacggatcaccggtgcgctttccccggtgatggcgctttcatcgacgcttgcacccccttcaataacttcaccatcgcaggggataatatcgccagcttctaccagtacgatatcgcctttacgaagttggtcggcaggaactttgtccgccgcagcgccatatttcggctcacgcagcttgcgggcaaaggcagtttttttcacccctttcagactgttggcctgcgctttactgcggccttctgccagcgcctcggcgaaattagcgaacagtacggtgatccacagccaaccgctaatggccgcgctaaacagcgcattgccgggcatcgcaccgcttgccatcgcgatgctaatacaggtggtcagcagactgccgatccagacgataaacatcaccggattgcgccattgcgcctgcgggtttaattttttcaccgcttctttcagcgcctgaacgacaagtgttggttcgaatagcgccagttgtttacgactcatattcagtgctcactcaatatcatcaggagagatattccgccaccggaccaagcgccagggcagggataaaggtcagtgcgccaaccagcaacacggtgccgattaacaggccaacaaacagcgggccgtgcgttggcagcgtgccggagctggcggcttggctctttttactcaccaggctaccggcaattgccatcaccgggataatcaccccgaagcgaccgacaaacatgcagaacgccagtaaacagttccagaacggagagttggcgcttaatccggcaaaggcgctgccgttgttgttagcggcggaactcacggcgtacagcacttcgctaaaaccatgcgggccagggttgagcatggcgctacgtccggcgtcggtcatcatcgccaacgccgcgcccatcagcaccagcgtcggggtaaccagaattgccagtgcagtcagtttcatctcgcgtacgtcgatttttttacccagatattccggtgtacgaccaatcatcagcccggcaataaacaccgccagcaggacaaacagcatcatgccgtaaagaccagaaccgacaccgccgaacaccacttcaccaatttgcatcagccacatcggcaccatgccaccgagagcggtaaagctatcatgcatcgcaatcaccgcgccacaggaagccgccgtcgtcacgaccgcaaacaggctactgaccagcacgccgaaacggctctctttaccttccatattgatgctgctgtccgtgcccagtgccagcagatgaggattaccctgaacttctgcccacatcaccacgcctacgcagatgacaaaaatcacactcatcgcccacagcaacatgcgcccctggcggcgatcgcccatcacttcaccaaaggcaaagcacagcgccgttgggatcaagaagatcgccagcatctgcacgaagttggtcagtgcggttgggttttcaaacggatggctgctgttggcattaaagaagccaccgccgttagtaccgagcatcttgatcgcttcctgagaagctacaggccccatgggtaacagctgttgcgctccttcaacggtattcacagcctgataaggcagaaagttttgcagcgcaccttgttgaataaaaaacagtgcaatcaacaacgccacagggactagcacccataacgtgatgcgtagcagatcgacccaggcattcccgagcgtgctcatgctctggcgggtaaacgcacggatgagggcaaaaatcaccgcaatcccgctggcggcagaaagaaagttttgcaccgttaagcccgccatctggctgaaatagctcaacgtggtttcaccgctataagattgccagttggtattggtgacaaagctgacggcggtattcagcgccagatcccagctcagccctggcaactgctgtggattaagcggcagatagtgctgaccgagcaacataaaaaacagcaccgccagccccagcatgttcaggccgagaatggcacaaagatattgcttccagttcatctcacggtcagagacgccaagtgcgcgaaaaagtacgcgctcaacgcccgttgtaccgggaagaggaatgtcattaatcagccgcgccagcccgctgcctaaaggacgcgccagcaccattaacaccagtaaaaacgtggcgatcagtaagaacccttgcgcagccatcagaacgcctccgcattgatcagggcataaaccagataacccagtaataaaaacaccagcaatacgccggttatcacgcctgcactcacagtgcacctccagtggcctaaaagtgataccggaagggtagaattctggctgcaaagatttcgcaaaaatctgcgggcggggtgtaaaaaaagtataaaaatggcaaaagccatgatttaactaatgtttagtattaatttaacttttgtgtaacttaattacaggatgaatgtaaataaaccatcaataagcaaaaataagtggtcggatgagtagtaaaattacacaaaaggcggtactattttcatcagataaacaaattcatttttccggtgccattcaccgggtagatacaaaagggggagaaaagtatggaactctacagagaatatcctgcatggcttatctttttacgccgtacttatgcggttgcagcgggcgttctggcgctgcctttcatgcttttctggaaagaccgcgcccgcttttacagctacctgcatcgcgtctggagcaaaaccagcgataaaccggtgtggatggatcaggccgaaaaggcaactggtgatttttattgattgctgagttttgaatacattgaacgtctacacttactcctgtaaaccgctcaggagcagtaatgaatctacaacgatttgatgacagcaccctaatccgtatctttgcccttcatgagttacatcgactgaaagaacatggcttaacgcgcggggcgcttctcgattatcacagccgctataaactcgtctttctggcgcattctcagccggagtaccgcaaacttggcccgttcgtggctgatattcaccagtggcaaaatctggatgactattacaaccagtaccgccaacgcgtagttgttttgctttctcaccccgccaacccgcgcgatcacaccaatgttttgatgcacgttcagggttattttcgcccgcatattgattccacagaacgccagcagctggctgcgcttatcgacagttatcgccgtggcgagcaaccacttcttgcgccgctgatgcgtatcaaacactatatggcgctttatcctgacgcctggcttagtgggcagcgttatttcgaactttggccgcgtgtgattaacttgcgccatagtggagttttatgactacccatctggtctggtttcgccaggatttacgtctgcacgataatctcgcactggctgccgcctgccgcaatagctctgcacgcgtgctggcgttgtatatcgctacaccacgccagtgggcgacgcataacatgagcccgcgtcaggctgaacttatcaatgctcaactgaatgggctacaaatagcgcttgcggaaaaaggtattcctttattgttccgtgaagtggatgactttgtcgccagtgtcgaaatagttaaacaggtgtgcgcggaaaacagcgttacccacctgttttataactatcagtatgaagtgaatgagcgggcgcgggatgtggaagttgaaagagcgctgcgtaacgtggtgtgtgaaggatttgatgacagcgtgatcctgccgcctggcgcggtgatgaccggtaatcacgagatgtacaaagtctttacgccttttaagaatgcctggctgaaacggctgcgggaagggatgccggagtgcgtcgctgcgccaaaagttcgtagtagcggaagcatagagcccagcccatccattacgctgaattatcctcgtcagtctttcgatactgcgcattttccggtggaagaaaaagcggcgattgcgcaattacgccagttttgccagaacggtgccggagaatatgagcaacaacgagattttccggcagtggaaggcaccagccgtttgagcgccagcctggcaacgggcgggttaagccctcgccagtgcttgcatcgcttgttggctgaacagccgcaggcgctggacggtggggccggtagtgtctggcttaatgagctgatctggcgcgagttttaccgtcacctgataacgtatcaccccagcttgtgtaaacatcgtccatttattgcctggacggatcgtgtacagtggcagagcaatcccgcacatttacaggcctggcaggaaggcaaaacgggatacccgattgttgatgccgctatgcgtcagcttaacagcactggctggatgcataacaggctacggatgattacagccagttttctggtgaaagatttattgatcgactggcgcgaaggcgagcgatatttcatgagccagctgattgatggtgatttggcagccaataacggtggctggcagtgggccgctagtaccggaaccgatgcagcgccgtattttcgtattttcaacccgacaacccagggcgagaaatttgatcatgagggcgagtttatccgccagtggctaccggaactgcgcgatgtgccagggaaagtggtgcatgagccgtggaagtgggcgcagaaagcaggtgtgacgctggattatccgcaaccgatagtcgagcacaaagaagcgagagtacaaacgttggcagcgtatgaggcggcgcggaaggggaaataacagacgcgtcaggcaatcgagcccagatgccggatgcggcgtgaacgccttatccagcctacaaatttgtgcaaattcaataaattgcaggaaatacgtaggcctgataagacgcgtcaagcgtcgcatcaggcatcggtgctggcctattaagactccagcgccagcgcgcggtttctgaatttcagcgcctgatacagccaaatcatcagtaccagtcctacacacgccagtgcgccccaggtaatttgatcaaatacttcaatatatgcattgatggagtagttgatcgccccggaagcatcaaagctagcctggcttgtctgatcggcaatcacgcccgccagatagttcgcgatcgcgccagaaagcagcatgtagatgccggttaatacgccggtcacaccggggatttcaatgcgcgtaatttggctcatggcaaccgggtcgataaacagttccgcaaagcccatcaccgccaggcctaataccatcagtggcagagaagagtgaccatacattgcggaccagcgggcgcttaaggtcagaatgcagaatccggcgctcatcaggccaaggccaagagcaaatttcccccagatgcgcacggtacgattacccgcgacactctcttttaccacccacgccaggaacacaccgcacagcataactgcgaaggcattaatgctctggaacatcgcggtcggaacggtataaccaaacatatcgcggttaacgaagcggtcgatataaaggctaatgctgctaccgccctgttgtgcgaaggcccagaacaacatactgaagaaggtgagcgtcacaatcagccccagctccttccgctgtttctggttttctgctttgcgataaatttttgccagtacacccaggccaataatagtcgcgacaattaaggcgtatacgctccactctttccagaacagtatggtaatcagtgcaggcgttgccaccagcagaaccagcagccatccccagttcggcaggagaaagtttgtcgcacgcagtacttttttgttaacgccgcgggtatgagtgaaatgacgattgccacataagaaaatgaccagacccgcgatcatgccaaccgccgccaggccaaagcccatcgcccagctgtactcttcctgggcgtaaccacaggcgataggtgcgataatagaccccacgttacccgccgcatacatcaggctgaaaccgccatcacgacgcggatcggttggctcatacagctcgccgagcagacagcttacgttagatttaaacaggccatagccgcagacgataatcgccagggacagatagaggaaactcggatggatctcactggcacccagcaccacatgaccgatcgccatcaacaacgcccccagcatcaccgccatgcgattgccgagaactttatccgccaaaaagccaccgaggattggcgtgacatacaccaggctacagtaggcgctaaataactcgtaggcgtgagtatcgttgtattttagttgattggtgagatagagaatcagcagggcacgcatgccgtaaaagctaaaatattcccagatttgcagcgcaacgacatagtaaatagcgcgcggctgacttgcgtgtttattcataataattccacaattgacggcaacgtcacgtaatagttgcgcggcgtgcttgtgtttccttaaagttaaaactttgatacagatctgattatttatgcaatatgctgtctgattgcataaatatacattagctgaagcgtgatgatataaacaatttgcgtcttttggcgtcgggtttgtttcttaatatgtcaaaagattggctatcgacgaactggcgaggtaacgctatgttaacggtgtagctatcagaatacggaaggcgcgaagatgaaaaacaccgaactggaacaactgattaacgaaaaactgaacagcgcggcgattagtgattacgcgccgaatggtttgcaggtggaaggcaaagagacggtgcaaaaaattgttaccggtgtcaccgccagccaggctttgctcgatgaggcagtgcgtctgggcgcggatgcggtcattgtgcatcatggctacttctggaaaggagagtctccggtcattcgcggaatgaagcgtaaccgtttaaaaacgttgctggcgaatgatatcaacctgtatggctggcatttgccgcttgacgcacatcctgagctgggcaataacgcacagctggcggcgttactggggatcacggtcatgggcgaaattgagccgttggtgccgtggggcgaactgaccatgcctgtgccgggactggagctggcttcctggattgaagcgcgtctgggacgtaagccgttatggtgtggcgataccggacctgaggtggtccagcgcgtcgcctggtgcacgggcggcgggcaaagttttatcgatagcgccgcgcgttttggcgtggatgcttttattactggcgaagtttctgaacagaccattcatagtgcccgcgagcagggattgcatttttatgctgcaggtcaccatgccactgaacgtggtggtattcgcgcattgagcgagtggctgaatgaaaataccgatcttgatgtgacctttattgatattcctaatcctgcataacgaataatcagagggatcgaaagtgcaacgagcgcgttgttatctgataggtgaaacggcggtagtgctggaactggaaccgccggtgacgctggctagccagaaacggatctggcgactggcgcagcgtctggtggatatgccgaatgtggttgaagccattcccggcatgaacaatatcacggtgattttgcgtaatcctgagagcctggcgctggatgccatagagcgtttgcaacgctggtgggaggagagcgaggcgctggagccggagtctcgctttattgaaattccggtggtttacggtggtgcaggcggaccggatttggcggtggtcgcggcgcattgcgggttgagcgaaaaacaggttgttgaattgcactcctccgtggaatacgtggtctggtttttaggttttcaaccgggcttcccgtatctcgggagtttgccggaacaactacacacgccacggcgcgctgaaccgcgcttactcgttccggcaggttctgtcgggatcggcgggccgcagactggtgtttatccgctggcaacgccgggtggctggcagttgattggtcataccagtctcagcctgtttgatccggcgcgtgacgaacccatcttattacgtccgggagacagcgtgcgctttgtaccgcagaaggagggagtatgctgaagattattcgtgcgggcatgtataccactgtgcaggatggcggtcgtcacggttttcgccagagcggtatcagccactgcggcgcactggatatgcccgcgttacgcattgctaacctactggtgggtaatgacgccaatgcccccgcgctggagatcacgctcggtcagttaactgttgagttcgaaactgatgggtggtttgctctgacgggtgccggttgcgaagcgcggctggatgataatgccgtctggaccggctggcgattgccgatgaaagcaggccagcgtttaacgcttaaacgcccgcagcacgggatgcgcagttatctggcggtcgcgggtggtattgatgttccgccggtaatgggcagttgcagcaccgatctcaaagtggggattggcgggctggaaggccgtttactgaaggatggtgaccgactcccgattggcaaaagcaagcgtgattctatggaagcgcagggcgttaaacagctgctgtggggcaaccgcattcgcgccttgccggggccggaatatcatgagttcgatcgcgccagccaggatgcattctggcgtagcccctggcagcttagcagccaaagtaaccgcatgggctatcgcttacaggggcaaattttaaaacgcaccaccgatcgcgaactgttatctcacggtttgttaccgggcgtggtgcaggtgccacataacgggcagccgattgtgttgatgaacgacgcacagaccaccggtggttacccgcgtattgcctgtatcattgaggctgatatgtaccatctggcgcaaattccgctcggtcagccgattcattttgtccagtgtagtctggaagaggcactaaaagcacggcaagatcagcaacgttattttgaacaattagcgtggcggctgcacaatgaaaattgacctgaacgccgatctgggcgaaggctgcgccagcgacgcagagctattaacgctggtttcctctgccaatattgcctgtggatttcatgcaggcgatgcgcaaatcatgcaggcttgcgtgcgtgaagcaataaaaaatggtgtcgcgattggcgctcacccgagttttcccgacagggaaaattttggtcgcagcgccatgcagctgccgccagaaaccgtttacgcccagacgctgtatcaaattggcgcgctggcaacgattgcccgtgcgcaaggcggcgtaatgcgtcatgtcaaaccgcacggcatgttgtacaaccaggcggcgaaagaagcacaactggcagacgccatcgccagagcggtatacgcttgcgatccagcattgattctcgtcgggctggcgggaagcgagctgattcgtgcaggcaagcaatatggtctgacaacgcgcgaggaagtgtttgccgatcgcggttatcaggctgacggcagcctggtgccgcgaagccagagtggcgcgttgattgaaaacgaagaacaggcgctggcgcaaacgctggagatggtgcaacacggcagagtcaaaagtatcaccggcgaatgggcaacggtcgcggcgcaaacggtctgcctgcatggcgacggcgagcacgcactggcgttcgcccgccgactacgctctgcatttgccgaaaaggggattgttgtcgcagcataaccccgattaataaagaatgaaaaaaggatatcaccatgcctgaaggcccggagatccgccgtgcagcggataacctggaggcggcgatcaaaggcaaaccactaactgatgtctggtttgccttcccgcagttaaaaccttatcaaagtcaacttatcggtcaacacgttacccatgtggaaacgcgtggtaaggcgttgttaactcatttttccaacgacttaacgctctacagccataatcagctttacggcgtctggcgcgtggttgataccggcgaagagccgcagaccacgcgagtattgcgggtaaaactgcaaacggctgacaaaaccattctgctttatagcgccagcgatattgagatgttgaccccggaacaactgaccacgcatccgtttttacaacgcgttggtcccgatgtgctggatccgaatctgacgccggaggtggtgaaagaacgattattgagcccgcgctttcgtaaccgtcagtttgctggattactgctcgatcaggcgtttctggctgggcttggcaattatttgcgggtggagatcctctggcaggttgggttgactggaaatcataaagcgaaagatctcaatgcggcgcaactggatgcactcgcacacgcgttactggagattcctcgattttcctacgctacgcgggggcaggtggatgagaataagcatcatggggcgctgtttcgctttaaggtttttcatcgagatggcgaaccgtgcgaacgttgtggcagcatcattgagaaaaccacgctgagttctcgcccgttttactggtgccctggctgccagcattaagcgctccgcttcggcgcataggtactaataaaccgcgcaatggcaggccctgtcagcaaaatactgaacaggcgtagggtttgcatcgccataatgagcgccatatcggcattgctccctgcggcgatgaccgccacggtatcaagcccgccggggctggtggcgaggtaggcagtcataaaatcaatgtgcataaaccgggtcagcccccacgccatacccgcacaaatagccagcagagcaaaaatgctcagcaggatttgcggtagcgggcgtagtgcccgcagtaagatttgtttatcgaaaccaagaccaatccgccagccaattgccatatacgccatcgccagcagccattccggtagttcgatggtgatgagctgaccagactggagcactgcgcccgccagcatcgggatgagcatcgtgccggaaggaagacgcagcaggcatcccactgtaccggcaacgaccgcgagcaaaatagtaagcaggagattaatgctcactggcgggaaccagacgatatgctggttaaccgcttcagcgttatcgcccagcatcatgcgggtgaccagaacagcggcccccgcgacgaacagcactcgcagatattgcataaacgccaccaggcgaatatctgcgccgtaatcttgcgccatagcgaccattgccgccgcgccgccaggagaggagccccaggcaccggtatttccaggcaaactgctatagcgcaccaataaccaacccacaatggcgctggaaagcagcgttaccagtaaaattgcaagcacgatcggccagttgacggccagggtggtgagaatgctaccagtgaggttttgcgcaatcatgcagccaagaatggcctgggcggcgagaaaagcagagcggggaagttgcagagtaattccgcgcatactaaagatgatcccggcgatcatcggcccaagtaatagcgccgccgggagatgtaccgcgaggaaaccaatagaaaggagaagacttagcacacataacattccccactgcaaaactggcatccttcgctccctcattattttctctttggtgtatcgatacagcataaagaaagctgggccaggaaaaaataacagcaatcaaggaaaaggggaaaatcagcaattttctgaaagagatgccctttccggcggcaaagggcatcatggtaaatcagttatagttaatcttaaaaagcaccactgtatcgaaggggccagcctcgatgggggtgcctggaatggagctaagttcagccgtataggttttttcgtagaccaacatgtcactggtgaaatcggcgtattcagcatatttattgaaggtataagggctggcgttttcatccagtaaacgtagcttcagaccattaccaatcaacaatgctttatcttcttcaaccaacgtttcttcggtataaaaggaggaactgactttaaatccgtcggtgcattgatcgttttggctcttggtcgttttaatactgaacgttttgctcattgtgtggcgacgtatatccagcaaattaaatttaccaaaatcaatcacctgtgtttccggactaatggaaaaattgacgctgcaatccagcacgcgaatgttttccagaccagtaatatgatatttcaggttttgggcagtagggtcttcgttaacgctaccggcaccgtcaaattgcacgacgatatagtcgctaagcgtactttgataatcatgcggcggcatttctcgtattttgacgtataaccgcatgcgagcgagaaaggtacggctcatatgaatattagcgggatcgccgctgcaaattttgttctgccatcccatcgcgatgatctgctcaggggtataaatatcaatgttcttactgtcgatacactggttagtgtcgatgcgactttttcccagactggcatcgtaatcgacaccgttgtatgtcacgccgagttgataataacgatcctgcacccccggataggggtttacccaggcgtagacatgctcgctttcaaagttgccgttggtattgttgtcacaatagacgggaattttaatatcgtcagattcccagatcttatcaccgggtttggcattgcctggtacagcaaacggttgaatcgcttcacttttttctactgcgccaccagatgtaccaaaatagcagttcagcgccattgcagacttcaacggcagaaataacaggcagatgacgagcaacaatcccttgccagcactcatttcgcctccactgcttgtaaacggcattgtccgctgcagttgagcgtcgtcatgcgtaatgcgccgtaatcatccatgtaaccgagataaaactggctgccgctataacttccggtgtttgtgttgaccgtactaaaaggtgcaaccatcacggttttgaagcctgggagaacgcctttttcatttctccccagataggcaatggtcagataatacgcggtaggatttttcagtgtcagttggttgccctgctggctgacctgtaactgcagttcgaccttttctcctgctttcttgcgtaatgcagccggtcgccagaacaatttaatacgactttgaatagcgacctgaagtatcgcatggtcgctgcttttatccggagcgggaggaatttcgcgcatattgtagaaaaatagcgtttcgcgatcgccaggtaattgtgtggtactggcttgtttcacaacccgcacctggcttgtcgctttcggttccagacgttgaatagggggcaaagcgaccagaagagcatcgcttttctcccctttttcattttctatccaggaataagcaagataaggcagtttgtcactttggttttcgatacgcaggctggtggctttgtcattggcgttaaacacaatgcgtgtgcgatcgggttgcaccgcagcattgcaacccaagctgatggttaacaacattaagggtaatcctttaataaatgtcattctcttttccttaattaatgacaaggtaaaatcaggcgtttggtcgtgtcttccagacgttctggcagatgaataatgcagctttgctcaccccagaccacggtaaacagttgattttcagcgacaccgcttaaccaggcatgtccttcctcgccaaccatacccacgctaatgccgctgtcatcctggcggatatccgcaccgaggggagggaactgaccgctggcgttgcgtatgatgacgttaacgtctttaccggaacgggaagccagacttttgtaacctatcgcgccttcaatccatgtttccttgatgacgttttctgcaactgttacgccgtcgggtaagtcattcatgttcaccgccacggtggaaggctggtaactggaaatcaacggcaccaccgcaatgccaaaatggttggtgtagtcgagattgccctgaaccggaatatctgccacgccatcggtgctgaccatcaggcgtggttcattggtggagctgcggcgatgaaatgctgcaccatattgggttgcggtgaaagaaccgctccagctgctgctgacggaactgtaatcactggcggcataggtaccagaaatatcccactcacccgcactactcaggtgctgatagttaccgctcacctgggctccattgtccggacgatcggattgcagtccggcagacatgccccagctattacgttcatccagcgtatcgttccagctcatgcggtgtatggtgctgtggctactgttttgcatgtcatagccaacccgaccaccgttaccgaaggggaggctaatgctcagataaatctggttgtcgcgatctttatcttcgtagtgggtcgtattgaaactcgtgctaatgctgatatctctccagtcaccaatatcaacattaaaacctgctgtgatgttggcggtcgtggaggcgtctgcattccaccaggtttgatgtagcaggttggcgtaaagattgaggtttagtggggtaatcggttggcccacggataagctgatcgtctgtttttcgtcctgcgcatcgctgtcgttgtatttgtgatccagatagttggcgtagctgtgaaaatgacgatcactgaagcgataagcggcgaggctaatcgtgctgttggtggcatccacttgtttgctgtaattaaaacggtagcttaagccccgctcgtcctgctgagtatcaaaatggctactggcccaggtgacatcaaaggacagtgcgccaagccacagcatattttgcccgatacccattgcggcagaatggtagtcatcatcagaaatcagcaggccgccgtacaggctggtgttactgagcatcccccaggaaacttcattgctaaaaaaggtttcattttcagtttgatgactcatggaaggccgtggctgacccgcggccaatttatagcgaacctgtccctggcgagtcaggaagggcgtgcttgctgcgctaacctggaaattgttcacccgaccatcttcttccgtcactttgacatccagcgtgccctgaacagactgattgaggtcatcaataataaacgggcctggcgggacttttttctggtaaatgacgcggccactttgactgatcgtcaccgtggcattggtctgtgcaataccgctaatttgtggggcgtagccacgcagctcccacggtaacattcgatcgtcactcgccagtgccgcgccggtataagaaaaaccatcgaaaatattggaactgaaatcggtttcgccgagggttaacttagagcctaattgcggtaatggacgaaaaagataggtgcggcttattccgccactctggtcatggttatcttcgctatcggtcttattaagctggtaatcactgcgtaagcgccatgccccggcgttaattccggcggtaccgtaggcattcaggttagtgctgctgctgccgtcctgtgggcggtagctgctggcaaacaagttgtaatccatcaggacaccggcaacaccttctttccatgtagaggggggagcccagttttcactgtgccacgccagccaggcttgcggaatactaatattcagttgctgattggcttgatcgaaattgaagagcatttcaggtcgggaactgaaatcaatacaccgatctatctgtggcaaggactgacggatatctggttttaaaccaaatttatcgaccagactatcattgatgcatggaatggttttgtcaccctttttttgccagttaattttttgcccattactgattttgttgttattcaccgcaacgctaacaaaatattcaccgggagcaatgactcctttttcctttaataaactaatatcaatgcggtcgcgcatacttttatcgagaacattcagattgaattcgaccgccattgcgcaaggcatcgccatgaccaggcaggatacaaaagagagtcgataaatattcacggtgtccatacctgataaatattttatgaaaggcggcgatgatgccgccaaaataatacttatttataatccagcacgtaggttgcgttagcggttacttcacctgccgtgacatcgactgcattatcaatttgttccatccaggcgaaaaagttcagcgtctgttcactactgcttgcatccaggtcaagatctggcgcggcactacctaatacgatgttaccgtcatttttgtccatcagtcgtacaccgaccccagttgcttcgcctgcactggtgttgctcaacaaaggcgtagcaccagttgtcttagccgtgctatcgaaggttacgccaactttggataccggcattccgctaccgttgtcagaagcaggcagatcacagttgatcaagcgaatgtcgacggccactttattgctatgatgctcccggtttatatgggttgtcgtgacttgtccaagatctatgtttttatcaatatcttctggatgaatttcacaaggtgcttcaataacctcccccttaaagtgaatttcgccagaaccttcatcagcagcataaacaggtgcagtgaacagcagagatacggccagtgcggccaatgttttttgtcctttaaacataacagagtcctttaaggatatagaataggggtatagctacgccagaatatcgtatttgattattgctagtttttagttttgcttaaaaatattgttagttttattaaatgcaaaactaaattattggtatcatgaatttgttgtatgatgaataaaatataggggggtatagatagacgtcattttcatagggttataaatgcgactaccatgaagtttttaattgaaagtattgggttgctgataatttgagctgttctattctttttaaatatctatataggtctgttaatggattttatttttacaattttttgtgtttaggcatataaaaatcaacccgccatatgaacggcgggttaaaatatttacaacttagcaatcaaccattaacgcttgatatcgcttttaaagtcgcgtttttcatatcctgtatacagctgacgcggacgggcaatcttcataccgtcactgtgcatttcgctccagtgggcgatccagccaacggtacgtgccattgcgaaaatgacggtgaacatggaagacggaatacccatcgctttcaggatgataccagagtagaaatcgacgttcgggtacagtttcttctcgataaagtacgggtcgttcagcgcgatgttttccagctccatagccacttccagcaggtcatccttcgtgcccagctctttcagcacttcatggcaggtttcacgcattacggtggcgcgcgggtcgtaatttttgtacacgcggtgaccgaagcccatcaggcggaaagaatcatttttgtctttcgcacgacgaacaaattccggaatgtgtttaacggagctgatttcttccagcattttcagcgccgcttcgttagcaccgccgtgcgcaggtccccacagactagcaatacctgctgcgatacaggcaaacgggttcgcaccgctagagccagcggtacgcacggtggaggtagaggcgttctgttcatggtcagcgtgcaggatcagaatacggtccatagcacgttccagaatcggattaacttcatacggttcgcacggcgtggagaacatcatattcaggaagttaccggcgtaggagagatcgttgcgcgggtaaacaaatggctgaccaatggaatacttgtaacacatcgcggccatggtcggcattttgctcagcaggcggaacgcggcaatttcacggtgacgaggattgttaacatccaggctgtcgtgatagaacgccgccagcgcgccggtaataccacacatgactgccattggatggctgtcgcgacggaaagcatggaacagacgggtaatctgctcgtggatcatggtatgacgggtcaccgtagttttaaattcgtcatactgttcctgagtcggtttttcaccattcagcaggatgtaacaaacttccaggtagttagaatcggtcgccagctgatcgatcgggaaaccgcggtgcagcaaaataccttcatcaccatcaataaaagtaattttagattcgcaggatgcggtactagtgaagcctgggtcaaaggtgaacacacctttactaccgagagtacggatatcaataacatcttgacccagcgtgcctttcagcacatccagttcaacagctgtatccccgttgagggtgagttttgcttttgtatcagccatttaaggtctccttagcgccttattgcgtaagactgccggaacttaaatttgccttcgcacatcaacctggctttacccgttttttatttggctcgccgctctgtgaaagaggggaaaacctgggtacagagctctgggcgcttgcaggtaaaggatccattgatgacgaataaatggcgaatcaagtacttagcaatccgaattattaaacttgtctaccactaataactgtcccgaatgaattggtcaatacttccacactgttacataagttaatcttaggtgaaataccgacttcataacttttacgcattatatgcttttcctggtaatgtttgtaacaactttgttgaatgattgtcaaattagatgattaaaaattaaataaatgttgttatcgtgacctggatcactgttcaggataaaacccgacaaactatatgtaggttaattgtaatgattttgtgaacagcctatactgccgccaggtctccggaacaccctgcaatcccgagccacccagcgttgtaacgtgtcgttttcgcatctggaagcagtgttttgcatgacgcgcagttatagaaaggacgctgtctgacccgcaagcagaccggaggaaggaaatcccgacgtctccaggtaacagaaagttaacctctgtgcccgtagtccccagggaataataagaacagcatgtgggcgttattcatgataagaaatgtgaaaaaacaaagacctgttaatctggacctacagaccatccggttccccatcacggcgatagcgtccattctccatcgcgtttccggtgtgatcacctttgttgcagtgggcatcctgctgtggcttctgggtaccagcctctcttcccctgaaggtttcgagcaagcttccgcgattatgggcagcttcttcgtcaaatttatcatgtggggcatccttaccgctctggcgtatcacgtcgtcgtaggtattcgccacatgatgatggattttggctatctggaagaaacattcgaagcgggtaaacgctccgccaaaatctcctttgttattactgtcgtgcttagtcttctcgcaggagtcctcgtatggtaagcaacgcctccgcattaggacgcaatggcgtacatgatttcatcctcgttcgcgctaccgctatcgtcctgacgctctacatcatttatatggtcggttttttcgctaccagtggcgagctgacatatgaagtctggatcggtttcttcgcctctgcgttcaccaaagtgttcaccctgctggcgctgttttctatcttgatccatgcctggatcggcatgtggcaggtgttgaccgactacgttaaaccgctggctttgcgcctgatgctgcaactggtgattgtcgttgcactggtggtttacgtgatttatggattcgttgtggtgtggggtgtgtgatgaaattgccagtcagagaatttgatgcagttgtgattggtgccggtggcgcaggtatgcgcgcggcgctgcaaatttcccagagcggccagacctgtgcgctgctctctaaagtcttcccgacccgttcccataccgtttctgcgcaaggcggcattaccgttgcgctgggtaatacccatgaagataactgggaatggcatatgtacgacaccgtgaaagggagcgactatatcggtgaccaggacgcgattgaatatatgtgtaaaaccgggccggaagcgattctggaactcgaacacatgggcctgccgttcagccgtctcgatgatggtcgtatctatcaacgtccgtttggcggtcagagcaaaaacttcggcggcgagcaggcggcacgcactgcggcagcagctgaccgtaccggtcacgcactgttgcacacgctttatcagcagaacctgaaaaaccacaccaccattttctccgagtggtatgcgctggatctggtgaaaaaccaggatggcgcggtggtgggttgtaccgcactgtgcatcgaaaccggtgaagtggtttatttcaaagcccgcgctaccgtgctggcgactggcggagcagggcgtatttatcagtccaccaccaacgcccacattaacaccggcgacggtgtcggcatggctatccgtgccggcgtaccggtgcaggatatggaaatgtggcagttccacccgaccggcattgccggtgcgggcgtactggtcaccgaaggttgccgtggtgaaggcggttatctgctgaacaaacatggcgaacgttttatggagcgttatgcgccgaacgccaaagacctggcgggccgtgacgtggttgcgcgttccatcatgatcgaaatccgtgaaggtcgcggctgtgatggtccgtgggggccacacgcgaaactgaaactcgatcacctgggtaaagaagttctcgaatcccgtctgccgggtatcctggagctttcccgtaccttcgctcacgtcgatccggtgaaagagccgattccggttatcccaacctgtcactacatgatgggcggtattccgaccaaagttaccggtcaggcactgactgtgaatgagaaaggcgaagatgtggttgttccgggactgtttgccgttggtgaaatcgcttgtgtaagcgtacacggcgctaaccgtctgggcggcaacagcctgctggacctggtggtctttggtcgcgcggcaggtctgcatctgcaagagtctatcgccgagcagggcgcactgcgcgatgccagcgagtctgatgttgaagcgtctctggatcgcctgaaccgctggaacaataatcgtaacggtgaagatccggtggcgatccgtaaagcgctgcaagaatgtatgcagcataacttcagcgtcttccgtgaaggtgatgcgatggcgaaagggcttgagcagttgaaagtgatccgcgagcgtctgaaaaatgcccgtctggatgacacttccagcgagttcaacacccagcgcgttgagtgcctggaactggataacctgatggaaacggcgtatgcaacggctgtttctgccaacttccgtaccgaaagccgtggcgcgcatagccgcttcgacttcccggatcgtgatgatgaaaactggctgtgccactccctgtatctgccagagagcgaatccatgacgcgccgaagcgtcaacatggaaccgaaactgcgcccggcattcccgccgaagattcgtacttactaatgcggagacaggaaaatgagactcgagtttagtatttatcgctataacccggatgttgatgatgctccgcgtatgcaggattacaccctggaagcggatgaaggtcgcgacatgatgctgctggatgcgcttatccagctaaaagagaaagatcccagcctgagcttccgccgctcctgccgtgaaggtgtgtgcggttccgacggtctgaacatgaacggcaagaatggtctggcctgtattaccccgattagcgcactcaaccagccgggcaagaagattgtgattcgcccgctgccaggtttaccggtgatccgcgatttggtggtagacatgggacaattctatgcgcaatatgagaaaattaagccttacctgttgaataatggacaaaatccgccagctcgcgagcatttacagatgccagagcagcgcgaaaaactcgacgggctgtatgaatgtattctctgcgcatgttgtagtacctcttgtccgtctttctggtggaatcccgataagtttatcggcccggcaggcttgttagcggcatatcgtttcctgattgatagccgtgataccgagactgacagccgcctcgacggtttgagtgatgcattcagcgtattccgctgtcacagcatcatgaactgcgtcagtgtatgtccgaaggggctgaacccgacgcgcgccatcggccatatcaagagcatgttgttgcaacgtaatgcgtaaaccgtaggcctgataagacgcgcaagcgtcgcatcaggcaaccagtgccggatgcggcgtgaacgccttatccggcctacaagtcattacccgtaggcctgataagcgcagcgcatcaggcgtaacaaagaaatgcaggaaatctttaaaaactgcccctgacactaagacagtttttaaaggttccttcgcgagccactacgtagacaagagctcgcaagtgaaccccggcacgcacatcactgtgcgtggtagtatccacggcgaagtaagcataaaaaagatgcttaagggatcacgatgcagaacagcgctttgaaagcctggttggactcttcttacctctctggcgcaaaccagagctggatagaacagctctatgaagacttcttaaccgatcctgacagcgttgacgctaactggcgtagcacgttccagcagttacctggtacgggagtcaaaccggatcaattccactctcaaacgcgtgaatatttccgccgcctggcgaaagacgctagtcgttactctagtacgatctccgaccctgacaccaatgtgaagcaggttaaagtcctgcagctcattaacgcataccgcttccgtggtcaccagcatgcgaatctcgatccgctgggactgtggcagcaagataaagtggccgatctggatccgtctttccacgatctgaccgaagcagacttccaggagaccttcaacgtcggtagttttgccagcggcaaagaaaccatgaaactcggcgagctgctggaagccctcaagcaaacctactgcggcccgattggtgccgagtatatgcacattaccagcaccgaagaaaaacgctggatccaacagcgtatcgagtctggtcgcgcgactttcaatagcgaagagaaaaaacgcttcttaagcgaactgaccgccgctgaaggtcttgaacgttacctcggcgcaaaattccctggcgcaaaacgcttcagcctggaaggcggtgacgcgttaatcccgatgcttaaagagatgatccgccacgctggcaacagcggcacccgcgaagtggttctcgggatggcgcaccgtggtcgtctgaacgtgctggtgaacgtgctgggtaaaaaaccgcaagacttgttcgacgagttcgccggtaaacataaagaacacctcggcacgggtgacgtgaaataccacatgggcttcagctctgacttccagaccgatggcggcctggtgcacctggcgctggcgtttaacccgtctcaccttgagattgtaagcccggtagttatcggttctgttcgtgcccgtctggacagacttgatgagccgagcagcaacaaagtgctgccaatcaccatccacggtgacgccgcagtgaccgggcagggcgtggttcaggaaaccctgaacatgagcaaagcgcgtggttatgaagttggcggtacggtacgtatcgttatcaacaaccaggttggtttcaccacctctaatccgctggatgcccgttctacgccgtactgtactgatatcggtaagatggttcaggccccgattttccacgttaacgcggacgatccggaagccgttgcctttgtgacccgtctggcgctcgatttccgtaacacctttaaacgtgatgtcttcatcgacctggtgtgctaccgccgtcacggccacaacgaagccgacgagccgagcgcaacccagccgctgatgtatcagaaaatcaaaaaacatccgacaccgcgcaaaatctacgctgacaagctggagcaggaaaaagtggcgacgctggaagatgccaccgagatggttaacctgtaccgcgatgcgctggatgctggcgattgcgtagtggcagagtggcgtccgatgaacatgcactctttcacctggagcccgtacctcaaccacgaatgggacgaagagtacccgaacaaagttgagatgaagcgcctgcaggagctggcgaaacgcatcagcacggtgccggaagcagttgaaatgcagtctcgcgttgccaagatttatggcgatcgccaggcgatggctgccggtgagaaactgttcgactggggcggtgcggaaaacctcgcttacgccacgctggttgatgaaggcattccggttcgcctgagcggtgaagactccggtcgcggtaccttcttccaccgccacgcggtgatccacaaccagtctaacggttccacttacacgccgctgcaacatatccataacgggcagggcgcgttccgtgtctgggactccgtactgtctgaagaagcagtgctggcgtttgaatatggttatgccaccgcagaaccacgcactctgaccatctgggaagcgcagttcggtgacttcgccaacggtgcgcaggtggttatcgaccagttcatctcctctggcgaacagaaatggggccggatgtgtggtctggtgatgttgctgccgcacggttacgaagggcaggggccggagcactcctccgcgcgtctggaacgttatctgcaactttgtgctgagcaaaacatgcaggtttgcgtaccgtctaccccggcacaggtttaccacatgctgcgtcgtcaggcgctgcgcgggatgcgtcgtccgctggtcgtgatgagcccgaaatccctgctgcgtcatccgctggcggtttccagcctcgaagaactggcgaacggcaccttcctgccagccatcggtgaaatcgacgagcttgatccgaagggcgtgaagcgcgtagtgatgtgttctggtaaggtttattacgacctgctggaacagcgtcgtaagaacaatcaacacgatgtcgccattgtgcgtatcgagcaactctacccgttcccgcataaagcgatgcaggaagtgttgcagcagtttgctcacgtcaaggattttgtctggtgccaggaagagccgctcaaccagggcgcatggtactgcagccagcatcatttccgtgaagtgattccgtttggggcttctctgcgttatgcaggccgcccggcctccgcctctccggcggtagggtatatgtccgttcaccagaaacagcaacaagatctggttaatgacgcgctgaacgtcgaataaataaaggatacacaatgagtagcgtagatattctggtccctgacctgcctgaatccgtagccgatgccaccgtcgcaacctggcataaaaaacccggcgacgcagtcgtacgtgatgaagtgctggtagaaatcgaaactgacaaagtggtactggaagtaccggcaagtgcagacggcattctggatgcggttctggaagatgaaggtacaacggtaacgtctcgtcagatccttggtcgcctgcgtgaaggcaacagcgccggtaaagaaaccagcgccaaatctgaagagaaagcgtccactccggcgcaacgccagcaggcgtctctggaagagcaaaacaacgatgcgttaagcccggcgatccgtcgcctgctggctgaacacaatctcgacgccagcgccattaaaggcaccggtgtgggtggtcgtctgactcgtgaagatgtggaaaaacatctggcgaaagccccggcgaaagagtctgctccggcagcggctgctccggcggcgcaaccggctctggctgcacgtagtgaaaaacgtgtcccgatgactcgcctgcgtaagcgtgtggcagagcgtctgctggaagcgaaaaactccaccgccatgctgaccacgttcaacgaagtcaacatgaagccgattatggatctgcgtaagcagtacggtgaagcgtttgaaaaacgccacggcatccgtctgggctttatgtccttctacgtgaaagcggtggttgaagccctgaaacgttacccggaagtgaacgcttctatcgacggcgatgacgtggtttaccacaactatttcgacgtcagcatggcggtttctacgccgcgcggcctggtgacgccggttctgcgtgatgtcgataccctcggcatggcagacatcgagaagaaaatcaaagagctggcagtcaaaggccgtgacggcaagctgaccgttgaagatctgaccggtggtaacttcaccatcaccaacggtggtgtgttcggttccctgatgtctacgccgatcatcaacccgccgcagagcgcaattctgggtatgcacgctatcaaagatcgtccgatggcggtgaatggtcaggttgagatcctgccgatgatgtacctggcgctgtcctacgatcaccgtctgatcgatggtcgcgaatccgtgggcttcctggtaacgatcaaagagttgctggaagatccgacgcgtctgctgctggacgtgtaatagtttaagtttcacctgcactgtagaccggataaggcattatcgccttctccggcaattgaagcctgatgcgacgctgacgcgtcttatcaggcctacgggaccaccaatgtaggtcggataaggcgcaagcgccgcatccgacaagcgatgcctgatgtgacgtttaacgtgtcttatcaggcctacgggtgaccgacaatgcccggaagcgatacgaaatattcggtctacggtttaaaagataacgattactgaaggatggacagaacacatgaacttacatgaatatcaggcaaaacaactttttgcccgctatggcttaccagcaccggtgggttatgcctgtactactccgcgcgaagcagaagaagccgctagtaaaatcggtgccggtccgtgggtagtgaaatgtcaggttcacgctggtggccgcggtaaagcgggcggtgtgaaagttgtaaacagcaaagaagacatccgtgcttttgcagaaaactggctgggcaagcgtctggtaacgtatcaaacagatgccaatggccaaccggttaaccagattctggttgaagcagcgaccgatatcgctaaagagctgtatctcggtgccgttgttgaccgtagttcccgtcgtgtggtctttatggcctccaccgaaggcggcgtggaaatcgaaaaagtggcggaagaaactccgcacctgatccataaagttgcgcttgatccgctgactggcccgatgccgtatcagggacgcgagctggcgttcaaactgggtctggaaggtaaactggttcagcagttcaccaaaatcttcatgggcctggcgaccattttcctggagcgcgacctggcgttgatcgaaatcaacccgctggtcatcaccaaacagggcgatctgatttgcctcgacggcaaactgggcgctgacggcaacgcactgttccgccagcctgatctgcgcgaaatgcgtgaccagagccaggaagatccgcgtgaagcacaggctgcacagtgggaactgaactacgttgcgctggacggtaacatcggttgtatggttaacggcgcaggtctggcgatgggtacgatggacatcgttaaactgcacggcggcgaaccggctaacttccttgacgttggcggcggcgcaaccaaagaacgtgtaaccgaagcgttcaaaatcatcctctctgacgacaaagtgaaagccgttctggttaacatcttcggcggtatcgttcgttgcgacctgatcgctgacggtatcatcggcgcggtagcagaagtgggtgttaacgtaccggtcgtggtacgtctggaaggtaacaacgccgaactcggcgcgaagaaactggctgacagcggcctgaatattattgcagcaaaaggtctgacggatgcagctcagcaggttgttgccgcagtggaggggaaataatgtccattttaatcgataaaaacaccaaggttatctgccagggctttaccggtagccaggggactttccacagtgaacaggccattgcatacggcactaaaatggttggcggcgtaaccccaggtaaaggcggcaccacccacctcggcctgccggtgttcaacaccgtgcgtgaagccgttgctgccactggcgctaccgcttctgttatctacgtaccagcaccgttctgcaaagactccattctggaagccatcgacgcaggcatcaaactgattatcaccatcactgaaggcatcccgacgctggatatgctgaccgtgaaagtgaagctggatgaagcaggcgttcgtatgatcggcccgaactgcccaggcgttatcactccgggtgaatgcaaaatcggtatccagcctggtcacattcacaaaccgggtaaagtgggtatcgtttcccgttccggtacactgacctatgaagcggttaaacagaccacggattacggtttcggtcagagcacctgtgtcggtatcggcggtgacccgatcccgggctctaactttatcgacattctcgaaatgttcgaaaaagatccgcagaccgaagcgatcgtgatgatcggtgagatcggcggtagcgctgaagaagaagcagctgcgtacatcaaagagcacgttaccaagccagttgtgggttacatcgctggtgtgactgcgccgaaaggcaaacgtatgggccacgcgggtgccatcattgccggtgggaaagggactgcggatgagaaattcgctgctctggaagccgcaggcgtgaaaaccgttcgcagcctggcggatatcggtgaagcactgaaaactgttctgaaataaatatctgtaataagaaatagccctcgccgcttccctctacaggaatggcgaagggctgtcggtttcgacatggttggccatcgtatgatggccttttttgtgcttatcggctactttttcgctgcgctatcagggtaaatttatagtcatcggtattaaaagcgttgcggctatattcaaacacccgaccatcaactaaatatccacggcttactttttcaagaatcggctttgtctggctgatattaagcagacggctcatctcttcggttggcatcagaggaatgatttcctgttcgctacgatcgataaccattttcttcacttcttcgataaagtgatatttgctattttccatgacctgccaggtgagatccgggaacaacgcaagcggcatccaggtttcttccagcgccattggcttttgcttgcgatagcgcacgcgcttcacatgccacacacgatcctgcggggtgatttgtagctgttgctgaagaaaatcgtcagccggaatcacttcgaatatcagaacttcactgtgtgtatcgacgtgacggtcgctcagtttttcatcaaaactggttaactgaaaaatatcgtaattgacccgctcttctttgacgtaagtcccgctgccctgaatgctttcgaggatctgctgctcgactagctggcgcaaagcctgacgcaccgtaacccggctgacgccaaactctgtttgtagcgcactttcagtgggtaacgcatcgccaggtttaagctcgccacgcgcaatttgttcacgaatgcgatcggcaatctgccggtataagggcttgtgtcccatttttagtatctcattaatacgaatttaaccattatgcccgataaattcatcctgtaaataatacaaatacaatacaaataatttcaatcaagtgaaattgatcacataatggtattgttttatcgggcacactggcgcgactataaaaacgatcaagtgaggatcatgatgaatctgacgactctgacccaccgcgatgcgttgtgtctgaatgcgcgctttaccagccgtgaagaggccatccacgcgttgactcaacgtcttgctgctctggggaaaatttccagtactgagcaatttctggaagaagtgtatcgccgtgaaagccttggcccgaccgccttaggtgaagggttggctgtgccgcatggcaaaactgctgcggtaaaagaagcggcgtttgcggtcgccacactcagcgagccgcttcagtgggaaggcgttgatggcccggaagcagttgatttagtggtgctgctggcgattccccccaatgaagcgggtactacgcatatgcaactgctgacagcgctgaccacgcgccttgcggatgatgagattcgggcgcgtatacagagcgcgacgacgcctgatgagttgctcagcgcgctggatgacaagggaggcacgcaaccttctgcctctttttccaacgcgccaactatcgtctgcgtaacggcctgtccggcgggtattgctcacacctatatggctgcggaatatctggaaaaagccggacgcaaactcggcgtaaatgtttacgttgaaaaacaaggcgctaacggcattgaagggcgtttaacggcggatcaactcaatagtgcaaccgcctgtatttttgcggctgaagtcgccatcaaggagagtgagcgttttaatggcattcccgcgcttagtgtgcctgttgccgagccgattcgccatgcagaagcgttgatccaacaagcgcttaccctcaagcgtagcgatgagacgcgtaccgtacagcaagatacgcaaccggtgaaaagtgtcaaaacggagctgaaacaggcactgttgagcggaatctcttttgccgtaccgttgattgtcgcggggggcacggtgctggcggtcgcggtattactgagccaaatcttcgggctacaagatctgtttaatgaagaaaactcctggctgtggatgtaccgcaagctgggcggcgggctgctcggaattttgatggtaccggtgctcgcggcctataccgcctattctctggcagataaaccggcgttagcgccaggctttgcggctggacttgccgccaacatgatcggctccgggtttctcggcgcggtcgttggcggattgatagccggttacttgatgcgctgggtgaaaaatcacttgcgtcttagcagtaaattcaatggattcctgactttttatctctacccggtgctcggtacgttgggagcgggcagtctgatgctgtttgtggtgggggaacctgtcgcctggatcaataacagccttaccgcctggctgaacggtctgagtggaagtaacgcgctgttgctgggtgccattctcggttttatgtgttcctttgaccttggagggccagtgaataaagccgcttatgcattctgcctgggcgcaatggcgaacggcgtttacggcccgtatgccattttcgcctccgtcaaaatggttagcgcatttaccgtaaccgcttccacgatgctcgcaccgcgcctgtttaaagagtttgaaattgagaccgggaaatccacctggctgttagggctggcaggtattaccgaaggggcgatcccgatggcgattgaagatccgctgcgggttattggtagctttgtgctgggctctatggtaacgggcgctattgtcggtgcgatgaatatcggccttagcacacccggtgccggcattttcagcctctttttacttcatgataatggcgcgggcggtgttatggcggcaattggctggtttggcgcggcattggtgggggctgcaatcagcactgcaattctcctgatgtggcggcgtcacgcggttaagcatggcaactatctgactgatggcgtaatgccataaacaaaaaggaaacgacgatgaaagcagtatctcgcgttcacatcaccccgcatatgcactgggatcgagagtggtatttcaccaccgaagagagtcgtattctgctggtcaataatatggaagagatcctgtgccgactggaacaggacaacgaatacaaatattacgtactcgacgggcaaacggcgatcctcgaagattatttcgcggtgaaaccggaaaacaaagaccgtgtgaagaaacaggtagaagccggcaagttgattatcggcccctggtatacccagaccgataccacgattgtttctgcggaatccatcgtccgtaatctgatgtacggaatgcgtgactgcctcgcgtttggcgagccgatgaaaataggttatttaccagattcctttggcatgtccgggcaactgccgcatatctacaatggatttggcattacccgcaccatgttctggcgcggatgtagcgagcgccacggtactgataaaaccgagtttttgtggcaaagcagtgacggtagcgaagtgacggcgcaggtgctgccgctgggctacgccatcggtaagtacttacctgccgacgaaaacggattacgtaaacgcctcgacagttattttgacgtgctggaaaaagcgtctgtaaccaaagagattttgctgccgaatgggcatgaccagatgccattgcagcaaaatatcttcgaagtgatggataagctacgtgagatctaccctcaacgtaagtttgtgatgagccgctttgaagaggtatttgagaagatcgaagcgcagcgagataatctggcaaccctgaaaggggaatttattgatggcaaatatatgcgcgtgcatcgcaccatcggttctacgcgtatggatatcaaaattgcccacgcgcgtattgaaaataagattgttaatctgctggaaccgctggcaacactggcctggacgttgggttttgaataccaccacggcttgctggagaaaatgtggaaagagatcttaaaaaatcatgcccacgacagtatcggctgctgctgtagtgacaaagttcatcgcgaaatcgtcgcccgcttcgaactggctgaagacatggcggataatctgattcgtttctacatgcgcaaaattgccgacaacatgccgcagagcgacgccgacaaactcgtcctgtttaacctgatgccctggccgcgtgaagaagttatcaacaccactgtgcggctgcgcgccagccagtttaatttgcgggacgatcgcggtcagcctgtaccgtattttattcgccatgcccgtgagatcgatccaggcctaatcgatcggcaaatagttcattacggtaattacgatccctttatggagtttgatatacagatcaaccagattgtcccttctatgggctatcgcacgctttatatcgaagcgaatcagcctggcaacgtaattgcggcaaaaagtgacgctgaagggatactggaaaatgctttctggcaaattgcgctcaatgaggatggttctctgcaactggtagataaagacagcggtgtgcgctatgaccgggtattgcaaattgaagaaagctctgatgatggtgatgaatatgactatagtcccgcaaaagaagagtgggtaattaccgcagcgaacgcgaaaccgcaatgcgatattattcatgaagcctggcagagcagggctgttatccgctatgacatggcagtgccgctcaatttgagtgaacgcagcgcccggcaatccactggcagagtaggggtggtgttggttgtcactcttagtcataacagcaggcgtattgatgtggatatcaatcttgataaccaggctgacgatcatcgccttcgtgtcctggtccctacaccttttaacaccgacagtgttctggcagatacgcagtttggtagcctaacgcgccccgtgaacgacagtgcaatgaacaactggcagcaagaaggctggaaagaagcgccggttccggtatggaatatgctcaactatgttgccttacaggaagggcgtaacggcatggctgtctttagcgaagggttacgtgaatttgaagtcatcggtgaagagaagaaaacctttgccattacgttgctgcgtggcgtgggcttactgggcaaagaagatctgcttttaaggcctgggcggcctagcggaattaaaatgccagtcccggacagtcaactacgtggtctgctttcttgtcgcctaagtttattgagttataccggtacgccaaccgccgctggtgtagctcagcaggcgcgagcatggctgactccagtacagtgttacaacaaaatcccatgggatgtgatgaagctcaacaaagccggattcaacgtgccggaaagttatagtttgttgaaaatgcccccagtgggatgcctgataagcgcacttaagaaagctgaagaccgacaagaagtgattttacggctgtttaatccggctgaaagtgcaacctgtgatgcgactgttgctttcagtcgcgaggtgatttcttgcagtgaaacgatgatggatgaacacattaccaccgaggaaaatcaaggtagtaatctaagcgggccttttttacccggccagagtcggacgttcagttaccggcttgcctgaatagcaatcaaaccgaagccacatatgcgcggccagattgttgacaaagggcgctttgttcatgccggatacggcatgaacgctttattcggtctacaaaagcaggcaaattcaatatattgcagagatgatgtagacactggcaagcgtagcgcatcaggtaattttgcgtttatcttcactctcaagccacgtatatgtggctttatttttaacaaaataataaccctgggtgagttaattataatataattataagttaactaaatgttaatattggcggggtggatttatgcctttattagtaatcctgaaactctgcgtcgtattagccagtgaccaaaaaaagaattaaggtcaaccgtgctgtttttgcttcgtctctttttatctttaattgccaaccgaaactaatttcagccttataactcacacattttaaacataaatgtcactaaagttaccttattgaaacatgattaacataatttgtaggaattgatatttatcaatgtataagtcttggaaatgggcatcaaaaagagataaattgttctcgatcaaattggctgaaaggcggtaatttagctataaattgatcaccgtcgaaaaatgcaaatttgcttcaacaaaaacctgtttattgtaaggattttgcggcgtaatatatacgtgggatcaatttgagtttttattaacatgtttgcaacctttctttacgccgtttttgtgtgcattcacatggtatgatgaaagtgttcaaacaaatttctattggggcatgcgtgtgaccctttctaacggggttcactctcggagtcttcatgcgatgagcaaggagtcatgatgttagatatagtcgaactgagccgcttacagtttgccttgaccgcgatgtaccacttcctttttgtgccactgacgctcggtatggcgttcctgctggccattatggaaacggtctacgtcctctccggcaaacagatttataaagatatgaccaagttctggggcaagttgtttggtatcaacttcgctctgggtgtggctaccggtctgaccatggagttccagttcgggactaactggtcttactattcccactatgtaggggatatcttcggtgcgccgctggcaatcgaaggtctgatggccttcttcctcgaatccacctttgtaggtctgttcttcttcggttgggatcgtctgggtaaagttcagcatatgtgtgtcacctggctggtggcgctcggtagtaacctgtccgcactgtggattctggttgcgaacggctggatgcaaaacccaatcgcgtccgatttcaactttgaaactatgcgtatggagatggtgagcttctccgagctggtgcttaacccggttgctcaggtgaaattcgttcacactgtagcgtctggttatgtgactggcgcgatgttcatcctcggtatcagcgcatggtatatgctgaaaggtcgtgacttcgccttcgctaaacgctcctttgctatcgctgccagcttcggtatggctgctgttctgtctgttattgttctgggtgatgaatccggctacgaaatgggcgacgtgcagaaaaccaaactggctgctattgaagccgagtgggaaacgcaacctgcgcctgctgcctttactctgttcggcattcctgatcaggaagaggagacgaacaaatttgcgattcagatcccttacgcactgggcatcattgcaacgcgttccgtggataccccggttatcggcctgaaagagctgatggtgcagcatgaagaacgcattcgtaacgggatgaaggcgtactctctgctcgaacaactgcgttctggttctaccgaccaggcggttcgtgaccagttcaatagcatgaagaaagacctcggttacggtctgctgctgaaacgctatacgccaaacgtggctgatgcgactgaagcgcagattcaacaggcaaccaaagactccatcccgcgtgtagcgccgctgtactttgcgttccgtatcatggtggcgtgtggcttcctgcttctggcaatcatcgcgctctctttctggagtgtcatccgcaaccgcattggcgagaaaaaatggcttctgcgcgccgcgctgtacggtattccgctgccgtggattgctgtagaagcgggctggttcgtggctgaatatggccgccaaccgtgggctatcggtgaagtgctgccgacagctgtggcgaacagcagtctgaccgcaggcgatctcatcttcagtatggtgctgatttgcggcctgtataccctgttcctggtggcagaattgttcttaatgttcaagtttgcacgcctcggcccaagcagcctgaaaaccggtcgctatcactttgagcagtcttccacgactactcagccggcacgctaagacaggagtcgtcaaatgatcgattatgaagtattgcgttttatctggtggctgctggttggcgttctgctgattggttttgcagtcactgacggtttcgacatgggggtgggcatgctcacccgtttcctcggtcgtaacgacaccgagcgtcgaattatgattaactccattgcaccacactgggacggtaaccaggtttggctgatcaccgcgggcggcgcactctttgctgcctggccgatggtctatgccgctgcgttctccggcttctatgtggcgatgatcctcgtgctggcgtctttgttcttccgtccggtcggttttgactaccgctccaagattgaagaaacccgctggcgtaacatgtgggactggggcatcttcattggtagcttcgttccgccgctggtaattggtgtagcgttcggtaacctgttgcagggcgtaccgttcaacgttgatgaatatctgcgtctgtactacaccggtaacttcttccagttgcttaacccgttcggcctgctggcaggcgtggtgagcgtagggatgatcattactcagggcgcaacctatctgcaaatgcgtaccgtgggcgaactgcacctgcgtacccgtgcaacggctcaggtggctgcgctggtgacactggtctgtttcgcactggctggcgtatgggtgatgtacggtatcgatggttatgtcgtgaaaagcacaatggaccattacgcagcctctaacccactgaataaagaagtggttcgtgaagctggcgcatggctggttaacttcaacaacacgccaattctgtgggctattccggcactgggtgtggttctgccgctgctgaccatcctgactgcacgtatggataaagccgcgtgggcgtttgtgttctcctccctgacgctggcctgcatcatcctgacagccggtatcgcaatgttcccgtttgtgatgccgtccagcaccatgatgaacgcaagtctgacaatgtgggatgcaacttccagccagctgacgcttaacgtcatgacctgggttgcggtggttctggtaccgatcattctgctctacaccgcctggtgttactggaaaatgttcggtcgtatcaccaaagaagatattgaacgtaacacccactctctgtactaagtaaggagctaaaaatgtggtatttcgcatggattctgggaacgcttcttgcctgtagctttggggtaatcaccgcgctggcgcttgaacacgtcgaaagtggcaaagccggtcaagaagacatctgatgagtaagattatcgcgactttgtatgcggtaatggacaagcgccccctgcgggcgctttccttcgtgatggcgcttctgttagcaggatgtatgttttgggacccatctcgttttgccgcgaagaccagtgaactggaaatctggcatggtttattgctgatgtgggccgtctgtgctggtgtgattcacggcgtgggctttcgtccgcagaaggttctttggcaagggattttttgcccattgcttgccgatattgttctcattgtcgggctgattttcttcttcttttaaatcagaattctctttaaaaaattatgggccgctccaggcccataaatttttacgctcccttaacttgccctcattcccaaacctcaatcgcgcgcgtatagtagcagcgtttaaaagctctaacttttgttgcattaccgggatgtaaagtgaatacaacgctgtttcgatggccggttcgcgtctactatgaagataccgatgccggtggtgtggtgtaccacgccagttacgtcgctttttatgaaagagcacgcacagagatgctgcgtcatcatcacttcagtcagcaggcgctgatggctgaacgcgttgcctttgtggtacgtaaaatgacggtggaatattacgcacctgcgcggctcgacgatatgctcgaaatacagactgaaataacaagtatgcgtggcacctctttggttttcacgcaacgtattgtcaacgccgagaatactttgctgaatgaagcagaggttctggttgtttgcgttgacccactcaaaatgaagcctcgtgcgcttcccaagtctattgtcgcggagtttaagcagtgactgacatgaatatccttgatttgttcctgaaggctagccttctggttaaacttatcatgttgattttgattggttttagtatcgcatcttgggccattattatccagcggacccgtattcttaacgcagcggcgcgcgaagccgaagcgtttgaagataaattctggtctggaatcgaactctctcgcctctatcaagagagccaggggaaacgggataatctgactggtagcgaacaaatcttttacagcgggttcaaagagtttgtgcgcctgcatcgtgccaatagccatgcgccggaagccgtagtggaaggggcgagccgtgctatgcgtatctccatgaaccgtgaacttgaaaatctggaaacgcacattccgttcctcggtacggttggctccatcagcccgtatattggtctgtttggtacggtctgggggatcatgcacgcctttatcgccctcggggcggtaaaacaagcaacactgcaaatggttgcgcccggtatcgcagaagcgttgattgcgactgcaattggtctgtttgccgctatcccggcagttatggcctacaaccgcctcaaccagcgcgtaaacaaactggaactgaattacgacaactttatggaagagtttaccgcgattctgcaccgccaggcgtttaccgttagcgagagcaacaaggggtaagccatggccagagcgcgtggacgaggtcgtcgcgatctcaagtccgaaatcaacattgtaccgttgctggacgtactgctggtgctgttgctgatctttatggcgacagcgcccatcatcacccagagcgtggaggtcgatctgccagacgctactgaaagtcaggcggtgagcagtaacgataatccgccagtgattgttgaagtgtctggtattggtcagtacaccgtggtggttgagaaagatcgcctggagcgtttaccaccagagcaggtggtggcggaagtgtccagccgtttcaaggccaacccgaaaacggtctttctgatcggtggcgcaaaagatgtgccttacgatgaaataattaaagcactgaacttgttacatagtgcgggtgtgaaaagcgttggtttaatgacgcagcctatctaaacatctgcgtttcccttgcttgaaagagagcgggtaacaggcgaacagtttttggaaaccgagagtgagtaaggcaaccgaacaaaacgacaagctcaagcgggcgataattattagtgcagtgctgcatgtcatcttatttgcggcgctgatctggagtagcttcgatgagaatatagaagctagtgccggaggcggcggtggtagctccatcgacgctgtcatggttgatagtggtgcggtagttgagcagtacaaacgcatgcaaagccaggaaagtagcgcgaagcgttctgatgaacagcgcaagatgaaggaacagcaggctgctgaagaactgcgtgagaaacaagcggctgaacaggaacgcctgaagcaacttgagaaagagcggttagcggctcaggagcagaaaaagcaggctgaagaagccgcaaaacaggccgagttaaagcagaagcaagctgaagaggcggcagcgaaagcggcggcagatgctaaagcgaaggccgaagcagatgctaaagctgcggaagaagcagcgaagaaagcggctgcagacgcaaagaaaaaagcagaagcagaagccgccaaagccgcagccgaagcgcagaaaaaagccgaggcagccgctgcggcactgaagaagaaagcggaagcggcagaagcagctgcagctgaagcaagaaagaaagcggcaactgaagctgctgaaaaagccaaagcagaagctgagaagaaagcggctgctgaaaaggctgcagctgataagaaagcggcagcagagaaagctgcagccgacaaaaaagcagcagaaaaagcggctgctgaaaaggcagcagctgataagaaagcagcggcagaaaaagccgccgcagacaaaaaagcggcagcggcaaaagctgcagctgaaaaagccgctgcagcaaaagcggccgcagaggcagatgatattttcggtgagctaagctctggtaagaatgcaccgaaaacggggggaggggcgaaagggaacaatgctagccctgccgggagtggtaatactaaaaacaatggcgcaagtggggccgatatcaataactatgccgggcagattaaatctgctatcgaaagtaagttctatgacgcaagctcctatgcaggcaaaacctgtacgctgcgcataaaactggcacccgatggtatgttactggatatcaaacctgaaggtggcgatcccgcactttgtcaggctgcgttggcagcagctaaacttgcgaagatcccgaaaccaccaagccaggcagtatatgaagtgttcaaaaacgcgccattggacttcaaaccgtaatcgcgatgttgactgttcggacggtcaacatcaggcaccggttgccacggggttctggtagttttgtgtattttagtttgttaacattctgctaaattatcgtgggccatcggtccagataagggagatatgatgaagcaggcattacgagtagcatttggttttctcatactgtgggcaagtgttctgcatgctgaagtccgcattgtgatcgacagcggtgtagattccggtcgtcctattggtgttgttcctttccagtgggcggggcctggtgcggcacctgaagatattggcggcatcgttgctgctgacttgcgtaacagcggtaaatttaatccgttagatcgcgctcgtctgccacagcagccgggtagtgcgcaggaagtacaaccagctgcatggtccgcactgggcattgacgctgtagttgtcggtcaggtcactccgaatccggatggttcttacaatgttgcttatcaacttgttgacactggcggcgcaccgggtactgtacttgctcagaacagctacaaagtgaacaagcagtggctgcgttatgctggtcataccgccagtgatgaagtgtttgaaaaactgaccggcattaaaggtgcgttccgtactcgtattgcctacgttgttcagaccaacggcggtcagttcccgtatgaactgcgcgtatctgactatgacggttacaaccagtttgtcgttcaccgtagtccgcagccgctgatgtctccggcgtggagtccagacggttctaaactggcttatgtgaccttcgaaagcggtcgttccgcgctggttattcagacgctggcaaatggcgctgtacgtcaggtggctagtttcccgcgtcacaacggtgcacctgcattcagcccagacggcagcaaactggcattcgccttgagcaaaaccggtagtctgaacctgtacgtaatggatttggcttctggtcagatccgccaggtgactgatggtcgcagtaacaataccgaaccgacctggttcccggatagccagaacctggcatttacttctgaccaggccggtcgtccgcaggtttataaagtgaatatcaacggcggtgcgccacaacgtattacctgggaaggtagccagaaccaggatgcggatgtcagcagcgacggtaaatttatggtaatggtcagctccaatggtgggcagcagcacattgccaaacaagatctggcaacgggaggcgtacaagttctgagctccacgttcctggatgaaacgccaagtctggcacctaacggcactatggtaatctacagctcttctcaggggatgggatccgtgctgaatttggtttctacagatgggcgtttcaaagcgcgtcttccggcaactgatggacaggtcaaattccctgcctggagcccgtatctgtgataataattaattgaatagtaaaggaatcattgaaatgcaactgaacaaagtgctgaaagggctgatgattgctctgcctgttatggcaattgcggcatgttcttccaacaagaacgccagcaatgacggcagcgaaggcatgctgggtgccggcactggtatggatgcgaacggcggcaacggcaacatgtcttccgaagagcaggctcgtctgcaaatgcaacagctgcagcagaacaacatcgtttacttcgatctggacaagtacgatatccgttctgacttcgctcaaatgctggatgcacatgcaaacttcctgcgtagcaacccgtcttacaaagtcaccgtagaaggtcacgcggacgaacgtggtactccggaatacaacatctccctgggtgaacgtcgtgcgaacgccgttaagatgtacctgcagggtaaaggcgtttctgcagaccagatctccatcgtttcttacggtaaagaaaaacctgcagtactgggtcatgacgaagcggcatactccaaaaaccgtcgtgcggtactggtttactaagagaattgcatgagcagtaacttcagacatcaactattgagtctgagcttactggttggtatagcggccccctgggccgcttttgctcaggcaccaatcagtagtgtcggcagtggcagcgtcgaagaccgcgtcactcaacttgagcgtatttctaatgctcacagccagcttttaacccaactccagcaacaactttctgataatcaatccgatattgattccctgcgtggtcagattcaggaaaatcagtatcaactgaatcaggtcgtggagcggcaaaagcagatcctgttgcagatcgacagcctcagcagcggtggtgcagcggcgcaaagtaccagcggcgatcaaagcggtgcggcggcaagtacgacgccgacagctgatgctggtactgcgaatgctggcgcgccggtgaaaagcggtaatgcaaacacggattacaatgcagctattgcgctggtgcaggataaatcccgccaggatgacgcaatggtggcatttcagaatttcatcaaaaattaccctgatagtacttacctgccaaacgccaattattggctgggtcagttaaactacaacaagggtaaaaaagatgatgcggcgtactattttgctagcgtagtgaaaaactatccgaagagtccaaaggctgcagatgcgatgtttaaagtcggcgtcatcatgcaggacaaaggtgacaccgcaaaagcgaaagccgtataccagcaggttatcagtaaataccctggtactgatggcgctaaacaggcacaaaaacgtctgaacgcgatgtaatgcataacacacgaccagaagtcgcattatttctggtcgtgtcgtgcgaatcataagcagttgagtgatctacatcgaaatttttgttgcgctcaagtctgaaatcagtaatatatgccgccgttgccacgggatatcaaacaaaccgaaagcaacgaaaaagtgggtcgttagctcagttggtagagcagttgacttttaatcaattggtcgcaggttcgaatcctgcacgacccaccaatcgctaaggtggaagcggtagtaaaacgtgaaggataacgttgcatgagcaacggcccgaagggcgagacgaagtcgagtcatcctgcacgacccaccactaacatagttagttgtagtatccagcgtagtatcgggtgattagctcagctgggagagcacctcccttacaaggagggggtcggcggttcgatcccgtcatcacccaccaccgggtcgttagctcagttggtagagcagttgacttttaatcaattggtcgcaggttcgaatcctgcacgacccaccagttttaacatcgaagacagatgttaagcgtgtaggataacgttgcgtcagcaacggcccgtagggcgagcgaagcgagtcatcctgcacgacccaccactaatgacggtgggttcggtggaagtagtttgtagtatccagcgcagtatcgggtgattagctcagctgggagagcacctcccttacaaggagggggtcggcggttcgatcccgtcatcacccaccactcgggtcgttagctcagttggtagagcagttgacttttaatcaattggtcgcaggttcgaatcctgcacgacccaccagttttaacatcaaactcagatgttaagcgtgaaggataacgttgcgccagcaacggcccgtagggcgagcgaagcgagtcatcctgcacgacccaccaatcttaaagattggccccgagtaaaaatctttcaggtaacacccgtatgggtcgttagctcagttggtagagcagttgacttttaatcaattggtcgcaggttcgaatcctgcacgacccaccaatttaaaggtggttactggtagagaacgtgaaggataacgttgcgttagcaacggcccgaagggcgagacgaagtcgagtcatcctgcacgacccaccatcctgaatgattaaggcagcataatcccgcaaggggtcgttagctcagttggtagagcagttgacttttaatcaattggtcgcaggttcgaatcctgcacgacccaccaatgtaaaaaagcgccctaaaggcgcttttttgctatctgcgatactcaaagattcgaacctgcagcaggtttgagttgagcgcagcgaaacaacggagccgctcgcggcgacggcccgaagggcgagcgaagcgagtcatcctgcacgacccaccaatgtaaaaaagcgccctaaaggcgcttttttgctattcaggcatcctcaatttcactttgtaaacctgatgacatcgtcagagcttactgtgcaagcaactctatgtcggtggaattaggcgtaaaatgacgcatcctgcacattaggcgtaattcgagtgacttttccccaccattcgactatcttgtttagcatataaaacaaattacaccgataacagcgaatattacgctaatgtcggttttaacgttaagcctgtaaaacgagatggtaagatgagcgtaatgtttgatccagacacggcgatttatcctttccccccgaagccgacgccgttaagcattgatgaaaaagcgtattaccgcgagaagataaaacgtctgctaaaagaacgtaatgcggtgatggttgcccactactataccgatcccgaaattcaacaactggcagaagaaaccggtggctgtatttctgattctctggaaatggcgcgcttcggtgcaaagcatcccgcttctactttgttagtcgctggggtgagatttatgggagaaaccgccaaaattctcagtccggaaaaaacaattctgatgccgacacttcaggctgaatgtagtctggatctcggctgccctgttgaagaatttaacgcattttgcgatgcccatcccgatcgtactgtcgtcgtctacgccaacacttctgctgcggtaaaagcgcgcgcagattgggtggtaactagtagcattgccgtcgaacttattgatcatcttgatagtttgggtgaaaaaatcatctgggcacccgacaaacatctggggcgttacgtgcaaaaacagacgggtggagacattctatgctggcagggtgcctgtattgtgcatgatgaatttaagactcaggcgttaacccgcttgcaagaagaatacccggatgctgccatactggtgcatccagaaagtccacaagctattgtcgatatggcggatgcggtcggttccaccagtcaactgatcgctgctgcgaaaacattgccacatcagaggcttattgtggcaaccgatcggggtattttctacaaaatgcagcaggcggtgccagataaagagttactggaagcaccaaccgcaggtgagggtgcaacctgccgcagctgcgcgcattgtccgtggatggccatgaatggccttcaggccatcgcagaggcattagaacaggaaggaagcaatcacgaggttcatgttgatgaaaggctgcgagagagggcgctggtgccgctcaatcgtatgctggattttgcggctacactacgtggataacgaataataaggcgtaacgttacgctttgggggaaagatggatttttttagtgtgcagaatatcctggtacatataccaataggggcaggcggttatgatctcagttggatcgaagcggtaggcacgatcgccgggttgctgtgtattggccttgccagtctggagaagatcagcaactacttctttggcctgatcaacgtcaccttgtttggcattattttctttcagattcagctgtatgccagcctgctattacaggtgtttttctttgccgcgaatatttacggttggtatgcgtggagccgacaaaccagtcagaacgaggcggagttgaaaattcgctggttgccattgccgaaggcactcagctggttggcggtttgcgttgttagcattggtctgatgacggtatttatcaatccggtgtttgcatttttgacccgcgtggcagtcatgatcatgcaagcattaggattacaggttgtgatgcctgaactgcaaccggacgctttcccgttctgggatagttgcatgatggtgttatctatcgtggcaatgattctgatgacgcgtaagtatgtggaaaactggctgttgtgggtgattattaacgtgattagcgtcgttatttttgcacttcagggcgtttacgccatgtctctggagtacatcatcctgacctttattgcgctcaacggcagccggatgtggatcaacagcgcacgtgaaagaggcagtcgcgcgctgtcccattaatggtgatgatgactatggccagacaccccttcattcaggtggcagtctggcccatgacaaggttgatattccatctgaatggtggcgtgctcaatctgatagtgatccatcaggtagtgttggatctgatccaacaaggcatcgtgatcgtgtggcgggatcacctgcacatgcaacgtcatcaccggcttctcgcctaccatccatacatgtacatggtgcacattgcggacttccgggatttcccggcacatacgacgcttcagttcagcgatatccaggcttaccggtgcaccttcaagtaattcattcacgctatctttcaacagtcgccacgcgctacgcagaaccagaaggctcaccagtatgctgagaatggggtcagcaggtgtccagccagtccagataataatcaacgcggcaataatagccccaacgctacccagcaggtccccgagcacatgcagtgccgctgctcgtacgttgaggtttttctcttcgctgccgtgatgaagtaaccagaaagaaagtatatttgccagcaacccagccacggcaattgccatcatcatgccgccctcgaccggacgcggcgtgcggaagcgttctatcgcctcccagacaatcaaaatggtaattaccacgagggctatggcattcacaaacgccgcgagcgtggtcagtcttagccaaccgaaagtgtggcgaatggtgggaggacgacgactaaattgcacggcgagtagggcgaaaagcagggcggcagtatcggtcaacatatgacccgcatcggccagcaatgccagagaaccagaaagaaaaccaccaacgacttctaccagcataaacccggcagtcacgccgaaagcatacaacaagcgacgagcattattatcttctggcaggtgactggacgtgtgactgtgactgtgcgccatgacgagtcatcccttaattattctcacttaactttatgacatcatactgcttttagaagtgaaaaattaaaagggagagactccgctctcccattattggctattttgcagggttactgcgtggtaccgtcggttttggtatcgacatcattattgatgccatcaccggtttgtacctttttattgatatccggacagcgaccatctttgcacatggtgttcttgtgctcttcatctttggtcattccgtcattgttcatactagaaccatcgctatgcagcattgtgccgccagaaccggtatttaccccgttattgtcgacgttatttggcgcgacattttcacgggcgtcaggggctacctggcccgcatcagctgcggcgtttgcctggccgttattagtttgcgctccgctatcggcagccagtgcggcaccgctggcaaggcttagagtggcagtcagaaataatgtggccagttttgtcattttcataggatgctcctgttatggtcgttatgtcggataacctcttccaacagtgcatttgcaggtgaatataaggcattggtttaagatttcagccaggttatgaaacgcagcagagaatcttgaaataattaacaaacaaaggagttacagttagaaattgtaggagagatctcgtttttcgcgacaatctggcgtttttcttgctaattccaggattaatccgttcatagtgtaaaaccccgtttacacattctgacggaagatatagattggaagtattgcattcactaagataagtatggcaacactggaacagacatgaattatcagaacgacgatttacgcatcaaagaaatcaaagagttacttcctcctgtcgcattgctggaaaaattccccgctactgaaaatgccgcgaatacggttgcccatgcccgaaaagcgatccataagatcctgaaaggtaatgatgatcgcctgttggttgtgattggcccatgcagtattcatgatcctgtcgcggcaaaagagtatgccactcgcttgctggcgctgcgtgaagagctgaaagatgagctggaaatcgtaatgcgcgtctattttgaaaagccgcgtaccacggtgggctggaaagggctgattaacgatccgcatatggataatagcttccagatcaacgacggtctgcgtatagcccgtaaattgctgcttgatattaacgacagcggtctgccagcggcaggtgagtttctcgatatgatcaccccacaatatctcgctgacctgatgagctggggcgcaattggcgcacgtaccaccgaaagccaggtgcaccgcgaactggcaagtgggctttcttgtccggtcggcttcaaaaatggcaccgacggtacgattaaagtggctatcgatgccattaatgccgccggtgcgccgcactgcttcctgtccgtaacgaaatgggggcatagcgcgattgtgaataccagcggtaacggcgattgccatatcattctgcgcggcggtaaagagcctaactacagcgcgaagcacgttgctgaagtgaaagaagggctgaacaaagcaggcctgccagcacaggtgatgatcgatttcagccatgctaacagctccaaacaattcaaaaagcagatggatgtttgtgctgacgtttgccagcagattgccggtggcgaaaaggccattattggcgtgatggtggaaagccatctggtggaaggcaatcagagcctcgagagcggggagccgctggcctacggtaagagcatcaccgatgcctgcatcggctgggaagataccgatgctctgttacgtcaactggcgaatgcagtaaaagcgcgtcgcgggtaaggtttaattgtcggatgcgccgtcagagtggcgtatccgatgaatcaccacaggcctgataagtcgcgcagcgtcgcatcaggcaatgtgctccattgttagcaacaaaaaagccgactcacttgcagtcggctttctcattttaaacgaatgacgtttacttcgctttaccctggtttgcaaccgccgctgctttcgctgcgatctcgtcagcattacccagataatagcgtttcagcggtttgaaattctcgtcgaactcatacaccagcggcacgccagtcgggatattaagctcaagaatctcttcttcgctcatgttatcaagatatttcaccagcgcacgtaaagagttaccgtgtgcagcgatgatcacgcgctcaccgctcttcatacgcggcagaatagtttcattccagtaagggatcacgcggtcaatggtcagcgccaggctttccgtcagcggcagttctttctcgctcagtttcgcgtaacgcggatcgtgacccggataacgctcatcatctttagtcagttccggcggagtcactgcaaaaccacgacgccactgtttcacctgctcgtcgccatacttttcagcagtttccgctttgttcagaccctgcaacgcaccgtagtgacgttcgttcagtttccaggatttctcaacgggcagccatgcctgatccagttcgtccagcacattccacagggtatggatagcgcgtttcagcacagaagtgtaagcaaagtcaaagctgtaaccttcctctttcagcagcttacctgctgcttttgcttcgcttacgcctttctcagacagatccacgtcgtaccaaccggtgaaacggttttctttgttccactgactttcgccatgacgaaccagaaccagcttagttacagccatatacttactcctcaaatcatcttttaatgataataattctcattatattgccgcgacgaagcaacagcaatgcttacgcataaccatagcgaaaatagtggcgcagtgtaaggttgttgtgaatattgagttgcaaatatgtcggtgtttgctggtgatttgaacaatatgagataaagccctcatgacgagggcgtaacattactcagcaataaactgatattccgtcaggctggaatactcttcgccaggacgcaggaagcagtccggttgcggccattcagggtggttcgggctgtccggtagaaactcgctttccagagccagcccttgccagtcggcgtaaggttcggttccccggctcggtgtgccgccgaggaagttgccggagtagaattgcagagccggagcggtggtgtagaccttcagctgcaatttttcatctgcactccagacatgcgccgccactttcttgccatcgcctttggcctgtaacaagaatgcgtgatcgtaacctttcactttgcgctgatcgtcgtcggcaagaaactcactggcgatgattttggcgctgcggaaatcaaaagacgttccggcgacagatttcaggccgtcgtgcggaatgccgccttcatcaaccggcagatattcgtccgccagaatctgcaacttgtgattgcgcacgtcagactgctcgccgtcaagattgaaatagacgtgattagtcatattcaccgggcaaggtttatcaactgtggcgcgataagtaatggagatacggttatcgtcggtcagacgatattgcaccgtcgcgccgagattacccgggaagccctgatcaccatcatcactactcagggcaaacagcacctgacgatcgttctggttcacaatctgccagcgacgtttgtcgaacccttccggcccgccgtgcagctggttaacgccctgacttgggctaagcgtcacggtttcaccgtcaaaggtataacggctattggcgatacggttggcataacgaccaatagaggcccccagaaacgcggcctgatcctgatagcattccgggctggcacagccgagcagcgcctcgcggacgctgccatcggaaagcggaatacgggcggaaagtaaagtcgcaccccagtccatcagcgtgactaccatccctgcgttgttacgcaaagttaacagtcggtacggctgaccatcgggtgccagtgcgggagtttcgttcagcactgtcctgctccttgacttggtttacaaacgtaaaaagtctctttaatacctgtttttgcttcatattgttcagcgacagcttgctgtacggcaggcaccagctcttccgggatcagcgcgacgatacagccgccaaatccgccgccggtcatgcgtacgccacctttgtcgccaatcacagctttgacgatttctaccagagtgtcaatttgcggcacggtgatttcgaaatcatcgcgcatagaggcatgagactccgccatcaactcgcccatacgtttcaggtcgccttgctccagcgcgctggcagcttcaacggtgcgggcgttttcagtcagtatatgacgcacgcgttttgccacgatcgggtccagttcatgcgcaacagcgttgaactcttcaatggtgacatcacgcagggctggctgctggaagaaacgcgcaccggtttcgcactgttcacgacgggtgttgtattcgctgccaaccagggtacgtttgaagttactgttgatgatgacgacagccacacctttgggcatggaaactgctttggtccccagactgcggcaatcgatcagcaaggcatgatctttcttgccgagcgcggaaattagctgatccatgatcccgcagttacagcctacaaactggttttctgcttcctgaccgttaagcgcgatttgtgcgccgtccagcggcagatgataaagctgctgcaatacggttccgaccgcgacttccagactagcggaagaacttaacccggcaccctgcggcacattgccgctgatcaccatgtccacgccgccgaagctgttgttacgcagttgcagatgtttcaccacgccacgaacgtagttagcccattgatagttttcatgtgcgacaatgggcgcatcgagggaaaactcgtcgagctgattttcataatcggctgccatcacgcgaactttacggtcatcgcgtggtgcacaactgatcacggtttgataatcaatcgcgcagggcagaacgaaaccgtcgttgtagtcggtgtgttcaccaatcaaattcacgcggccaggcgcctgaatggtgtgagtggcagggtagccaaatgcgttggcaaacagagattgtgttttttctttcagactcatttcttacactccggattcgcgaaaatggatatcgctgactgcgcgcaaacgctctgctgcctgttctgcggtcaggtctcgctgggtctctgccagcatttcataaccaaccataaatttacgtacggtggcggagcgcagcagaggcggataaaagtgcgcgtgcagctgccagtgttgattctcttcgccattaaatggcgcgccgtgccagcccatagagtaggggaaggagcactggaagaggttgtcataacgactggtcagctttttcaacgccagcgccagatcgctgcgctgggcgtcggtcaaatcggtgatccgtaaaacgtgggctttgggcagcagtagcgtttcgaacggccaggcagcccagtaaggcacgacggctaaccagtgttcggtttcgacaacggtacggctaccgtctgccagctcgcgctgaacataatccaccagcattggacttttctgttcggcaaaatattctttttgcaggcggtcttcgcgctcagcttcgttaggcaggaagctatttgcccaaatctgaccgtgcggatgcgggttagagcagcccatcgccgcgcctttgttttcaaaaacctgcacccatgggtacgttttccccagttctgcggtttgctcctgccaggttttgacgatttccgtcaatgctgcaacgctgagctctggcagcgttttactgtgatccggactaaagcagatcacccggctggtgccgcgcgcgctctggcaacgcatcagcggatcgtgactttctggcgcatctggcgtgtcagacatcaaagccgcaaagtcattagtgaaaacgtaagtcccggtgtaatcggggtttttatcgcctgtcacccgcacattacctgcgcagaggaagcaatctggatcgtgcgcaggtaacacctgtttggctggcgtttcctgcgccccctgccaggggcgcttagcgcggtgcggactaaccagaatccattgcccggtgagcgggttgtagcggcgatgtggatgatcaacgggattaaattgcgtcatggtcgttccttaatcgggatatccctgtggatggcgactctgccagtgccaggtgtcctgcgccatttcatcgagtgtgcgcgttacgcgccagttcagttcacggtcggctttgctggcgtccgcccagtaggccggaaggtcgccctcgcgacgcggtgcaaaatgataattaaccggtttgccgcaggctttgctgaaggcattaaccacgtccagcacgctgttgcctacgccagcgccgaggttgtagatgtgtacgcctggcttgttcgccagtttttccatcgccacgacgtgaccgtccgccagatccattacgtggatgtaatcgcgtacgccagtaccatcttcggtcggataatcgttaccaaaaatcgccaggctgtcgcgacggcctacagcaacctgggcgatgtatggcatcaggttattcggaatgccttgcggatcttcgcccatatcgccgctcggatgcgcgccaaccgggttgaagtagcgcagcagggcaatgctccagtccggctgggctttttgcagatcggtgaggatctgttccaccatcagcttgcttttgccgtaagggctttgcggtgtgccggtcgggaagctttcaacgtatggaattttgggctgatcgccataaacggtggcggaggagctaaaaataaagtttttgacgttagcggcgcgcatggcgctaatcaggcgcagagtgccgttgacattgttgtcgtaatattccagcggtttttgtacgctttcgcccacggctttcagcccggcgaagtggatcacggtgtcgatagcgtgatcgtgcaggatctcggtcatcaacgcttcgttacgaatatcgccttcaacaaacgttggatgtttgccgcctaaacgctcgataacaggcagtacgctgcgcttactgttacagaggttatcaagaatgatgacatcatgaccgttttgcagtaattgcacacaggtatgacttccaatgtaaccgctaccaccggtaaccagaactctcataattcgctccattaggcttatggtatgaaataaccatagcataacaaagatgcgaaaagtgtgacatggaataaattagtggaatcgtttacacaagaatttagccgttttttatgcgcgattaagtgattataaaacagagggtttatgaatgattgcgctttttatctgaaaaaagacgcggtttcatgcctgcatgcgtcgaaccgttggccggagagggtgctaaggccgcctccggcaaggtcagcactaccgactcaatatatttttgtcagcacatagcgatagagtccaccgtccggcacgaactcaagacgatgggtaatacaggcaggcgcatcttcagcgtggtggctaacaaacaacaattgcgtttcaccttcgctaatcagcacatcaacaaaacggcggataagctggcgattcagcggatcaagcccctgtagtggttcatcgagaataagcaacgtcggatgtttcaccagtgcgcggacaatcagcgccagacgctgctgtccccaggaaagactatggaacggagcgtcagccgtgcgtttatcaatgccgagaatatccagccactgctgcaccagtttttgctggcgatcgctaacggcctgataaatgccaatgctatcaaaatagccagaaagaatcacattacgcacggtagtgctgacccggtaatccagatgcaaactactgctgacgtaaccgatatgctttttgatatcccagatggtttcgccgctgccgcgacgtcgtccgaaaagcgtcaaatcgttgctgtaaccttgcggatgatcgccagtaaccaggcttaataacgtgctttttcctgcaccatttggcccgacaatttgccagtgttcgcctggattcacctgccagctaaggttattaagaatggggcgatcgttataagaaaccacgccattgttcagcacaatgcgcggttcgttggcgggtaaggcgtgacgtgcactaggttcatccggctccggcagttgcacaccttcaagctgttcactatgcgccagttgcgcgacgagtgcttgttggagcagttcctctttagcgccagtttccgctaacgtgcaatccgccagcacgccagcaaactggacaaactccgggatctcatcgaagcgattgagcaccagtaccagagtaataccggactgatgtaagctggcgagtcgctcagccagctgctgacgactggcaacatccaggccatcgaacggctcatcaagaatcaacaagtcaggctcgctcatcagcgcctgacacagcagggtttttcgcgtctcgccagtggaaaggtatttaaagcgtcggtcgaggagggcggtaataccgaactgctgcgccagttgcatgcaacgcggtgcatcctttacttcatcctgaatgatctcagccgtagtgcgtccggtgtcatcttcgccagggccgagcatatcggtgttattccgctgccattcgtcgctgacgagtttttgcaattgctcgaaggagagacgagtgatgtgggaaaactggctttgccgttcacctttcaaaagcggaagttcccccgccagcgcgcgggccagggcgcttttcccgcttccattgctaccgacaaacgcccaactatcacccgcgtttaacgttagctgaggcaattgcagcgtttttgtgtcgctaagacgaaacgtgccttgcaaaatttgcaagctactcattttatatcccactttgtgcagcgattactgacagggatacgtgtttcataacaaattgtcaacacgcttagcacagcgtggcgataatcacgctgtcggcattaaagtaggccgtgacattctgtccttgctgaagagaagtcgcttcatttaccggcactgtggcgcacagtgtttgcccgtcgggtagcgccattaatacttcgcactgctctgcgccgcgctcaatatgactaataatacccggtaattggttgtcagcgttttgcgcgaccgcctcgtcctgagtaatacctacccacggcgcttttagcaatatcaacacttctttgccttcatccagccccagacgcgcgccgctttgtgcggtaattgcgactttcaggcgtgtttttccgtcagccagtaagacatcaacatgctgttgaacgtcatcatgatcgcgggcggtgatggtaccgaaccactggttacgggcgctggtttgcagactaaaacgactgatcgcggccagcaggctgttcagcggcagggcgtcatcgtcacttaacacatcaaaggctttttgctggatttgcgccagtaagtcatagagctgaatcagtcgctgaccatagcgggtcagtactgcgccgccgccacctttaccgcctgttgcgcgctcgaccagaatatgctcacttaactgattcatctcgttaatggcatcccaggcgcttttatagctaataccggcatctttcgctccctggctaatggaaccggaaagcgcaatgtgttttagtaggctaatgcggcgcgggtcggcgaataatttttgttggagcttaagggtgagaaggatttcggcctgcataacaatgtcctggcaaaagtcttattgtgacggaaaacgaacgccacgcaaagctgaccgcacaaaaggggagtgcttttctgtgcttagcggttagaatagtctcatgactatatctggagttgaccatgttagagttattaaaaagtctggtattcgccgtaatcatggtacctgtcgtgatggccatcatcctgggtctgatttacggtcttggtgaagtattcaacatcttttctggtgttggtaaaaaagaccagcccggacaaaatcattgattccctgaatgcccgcttagtcgggcattttctttttctcaacttcctgcttttcctgccgatattttttcttatctacctcacaaaggttagcaataactgctgggaaaattccgagttagtcgttatattgtcgcctacataacgttacattaaggggttaccaatggctcgtaaatggttgaacttgtttgccggggcggcactctctttcgctgttgctggcaatgcactggcagatgaagggaaaatcacggtgttcgccgccgcaagtctgactaacgcaatgcaggacattgctacgcagtttaaaaaagagaaaggcgtggatgtggtttcttctttcgctagcagttctactctcgcccgtcagattgaagcgggtgcgcctgcggatctgtttatttctgccgatcagaaatggatggattatgcggttgataaaaaagcgatcgatacagctacgcgtcagacactgctcggcaatagcctggtcgttgtagcaccgaaagccagcgtgcagaaagatttcaccatcgacagcaaaaccaactggactagtctgctgaatggcggtcgcctggcggttggcgatccggaacatgttcccgctggcatttatgcaaaagaagcactgcaaaaactgggcgcatgggatacgctctctccgaaactggccccagcggaagatgttcgtggggcgctggcgctggtcgaacgtaacgaagcgcctctgggcattgtctacggttctgacgcagttgccagcaaaggggtaaaagtggttgccaccttcccggaagatagtcataaaaaagtggaatatccggttgctgttgtggaagggcataacaatgcgacagtgaaagcattttatgattatctgaagggaccgcaggcagcggaaatctttaaacgttacggatttacaatcaagtaatgatactgaccgatccagaatggcaggcagttttattaagcctgaaagtttcttccctggctgtgctgtttagcctgccgtttgggatcttttttgcctggttactggtgcgttgcacgtttccgggcaaagctctgctcgacagcgtactgcatctaccgctggtgttaccgcccgtggtcgtcggttacttattattagttagcatgggacggcgcggatttatcggtgaacgtctgtatgactggtttggtattaccttcgcctttagctggcgcggcgcggttctcgctgccgccgtcatgagctttccgctgatggtgcgggcaattcgtctggcgctggaaggggttgatgtcaaactggaacaggccgcaagaacactgggggccgggcgctggcgcgttttctttactatcacgttaccgctgaccttaccgggaattattgttggtacggtactggcttttgctcgttctctcggtgagtttggtgcaaccatcacctttgtgagcaacattcctggtgaaacgcgaaccattccttctgccatgtataccctgatccagacccccggcggggaaagtggagcggcgagactgtgcattatttctattgcgctggcgatgatctccctgttgattagtgaatggctggccagaatcagccgtgaacgggcggggcgctaatcatgctggaactgaatttttcccagacgttgggcaaccattgcctgactattaatgaaacgctgcccgccaatggcatcactgctatctttggcgtctccggtgccggaaaaactagcctgattaacgccatcagtggactgacgcgcccgcaaaaagggcggattgtcctcaatgggcgggtactaaatgatgccgaaaaaggtatctgcctgacgccggaaaagcgtcgcgttggctatgtttttcaggatgcgcggctgttcccgcattacaaagtgcgtggcaatctgcgctacggcatgagcaaaagtatggtcgatcagttcgataagctggtggcgcttttaggcattgaaccgttgcttgaccgtttaccaggcagcctgtccggaggcgaaaaacagcgcgtggcgattggtcgggctttgctgacagcaccggaattgctgttgctggatgaaccgctggcgagtctggatattccgcgtaaacgcgaactgttgccttatctgcaacggctgacacgggaaatcaacattccgatgttgtatgtcagccatagcctggatgagatcctccatctggcagacagagtgatggtactggaaaacggtcaggtgaaagcctttggcgcgctggaggaagtgtggggcagtagcgtgatgaatccgtggctgccgaaagagcaacaaagtagcattctgaaagtgacggtgcttgagcatcatccgcattacgcgatgaccgcgctggcgctgggcgatcagcatttgtgggtcaataagctggacgaaccgctgcaagctgcgctacgtatccgcattcaggcttccgatgtttctctggttttacaaccgccgcagcaaaccagcattcgtaacgtattgcgggcaaaagttgttaatagttatgacgacaacggccaggtggaagtggaactggaagtcggcggtaaaacgctgtgggcgcgtatcagcccgtgggccagggatgaactggcgatcaaacctggcctgtggctgtacgcgcaaattaaaagtgtgagcataaccgcctgattaaatcaggtggctataaatgaactgggcaatgctgtcggtggtgttatcaccaatcacaatgttggcgcgcgcttttaccgcgtcatcggcgttgcccatcgccacgcctgtaccagcggcttccagcatactgatatcattaaagttatcgccgaatgccacgacgttttccatgctccaaccttgcgcctcaacccatttcgtcaaacgtttacctttgctgttgccgccgcgtgcaatatcaacctgatcgtgccaggaccattcacactccagtcccagttcatgttcgacatgcttaccaaaatgctgcaattgcggcaggtcatcgtgcgtcagggcgaacttccatacggcgttaacttgttgcgccgtttcagccagagaagcgacttgtgtgaaagtcggacgctgttccggcggcagggtttgcgcccagttagatgtgcgaatgacatgcccggtcgggtgctcatagaccattgcatcatcgacatacatcagaccgtgaatgtggtgttcattcagcatctcaatgagttgcagggctttaataacgggcattgggtccgcttccagcacggtttttgcatgataatcatacaaataggtgccattacagcaaatagcaggtgtatccagcgccagcgcctgataaaaaggatgaatagcgacgtgatggcgacctgtgacgatgattaattgatagcctgcttcgcgagcgcgggccagggcttctatgctactaggaagcagggtctttttcggggtcaataaggtgccgtctaagtcgagagcaatcacgcgtgtggtcatggcgtattccagattaaggttaagaattttcgtctgcgcgaatggtacaccgataccactatcggacaaaattctgcgttttaattcagcattcaccgccaaaagcgactaattttagctgttacagtcagttgctaaatgcaaaggagcattcatgaagcaaacagtttatatcgccagccctgagagccagcaaattcacgtctggaatctgaatcatgaaggcgcactgacgctgacacaggttgtcgatgtgccggggcaggtgcagccgatggtggtcagcccggacaaacgttatctctatgttggtgttcgccctgagtttcgcgtcctggcgtatcgtatcgccccggacgatggcgcactgacctttgccgcagagtctgcgctgccgggtagtccgacgcatatttccaccgatcaccaggggcagtttgtctttgtaggttcttacaatgcgggtaacgtgagcgtaacgcgtctggaagatggcctgccagtgggcgtcgtcgatgtggtcgaggggctggacggttgccattccgccaatatcagtccggacaaccgtacgctgtgggttccggcattaaagcaggatcgcatttgcctgtttacggtcagcgatgatggtcatctcgtggcgcaggaccctgcggaagtgaccaccgttgaaggggccggcccgcgtcatatggtattccatccaaacgaacaatatgcgtattgcgtcaatgagttaaacagcagtgtggatgtctgggaactgaaagatccgcacggtaatatcgaatgtgtccagacgctggatatgatgccggaaaacttctccgacacccgttgggcggctgatattcatatcaccccggatggtcgccatttatacgcctgcgaccgtaccgccagcctgattaccgttttcagcgttagcgaagatggcagcgtgttgagtaaagaaggcttccagccaacggaaacccagccgcgcggcttcaatgttgatcacagcggcaagtatctgattgccgccgggcaaaaatctcaccacatcagcgtatacgaaattgttggcgagcaggggctactgcatgaaaaaggccgctatgcggtcgggcagggaccaatgtgggtggtggttaacgcacactaaccgctgatttacccggcgcagtctctcctgcgccggtgtattaacctatctcctgtaacgcgtgtctctggcgttcgacgatattggtccacaaattgtctttatcgtcagtccataaattaatcagcaaggcaaaaaagcgttctgctgctggagaaagtacggcatctttacggcgaattattcccaatgttcgacgtataacgggttccaccaatgggataccaataatgctagaatagggcgcatgaggcattgccaggccaggaagcgcgctaatccccagtcccgcctccaccagtcctaaactcgtgctaagatgacgcacttcgtaaaaccagtccagcttccagggcttgtcggccagctgttgttctatcaacagtcggttgccgctggaggagcgtacgccaatcattttgtaacccactaactcctgccattctacaagctgctttttggccaatggatggtcacgccgacaggccagcacgaacggctcgttgaccagtggggtaaaatcaatggaactatttgtgacgttgttcatgtttatgccaaagtcactttcgttacacagcacgctttccatgcaattattcgtgccttgttccagaatccgcactttaatattgggatacagctcattaaatttaccgattgccagcggtaaaaaataaaatactgcggtcggaatacacgctaacgtcaccataccacgatgataagcattcatatcacgaatattaaaaagcgtttcatcgaatttctttattaattcccgcgcctccgggagcaacctttttcctgcttttgttaacgtaaccttgcgagttgtacgctcaaatagttgaacatgtaaatcttcctccatcttttttattcttcgcgttaatgcaggttgcgtaatattgagtaatttagcggcattgttaaagctactggactctgccagtatgacaaatgccttcatactacttaattcatgcttcattattactccggaaaatggaaggctgctttttgggtggctggccgttaaaaattttaactgcatttagccaacttaaattaatgaaaaaatgttattaatcgttgagctaaagtcattagagatgctttgcccttaatgtaaccatatcgcaataagttatgtttttaaattgagggcattattatgaaaaaaataccctgcgtgatgatgcgaggtggaaccagcaggggcgcgttcctgttagcggaacatttacccgaagatcaaacgcagcgcgataaaatattgatggcaattatgggttccggtaacgatctggaaattgacggtattggcggcggtaatccactgaccagtaaagtcgccattattagccgttccagcgatccgcgtgctgatgtcgattatctgtttgcgcaggtaatcgttcatgagcaacgtgtcgataccacgcctaactgcggcaatatgctgtctggtgttggggcattcgccattgaaaatggtttgattgcagcgactagcccagttactcgcgtacgtatccgcaacgtcaatacgggtacgttcatcgaagctgatgtgcaaacgccaaatggtgttgtcgagtacgagggtagcgccagaattgacggcgtaccgggtactgccgcaccggttgcgctcactttcctgaatgccgctggaaccaaaaccggaaaagttttcccgactgataatcagattgattattttgacgatgtcccggtgacctgtatcgatatggcgatgccagtcgtcattattccggctgaatatctgggaaaaacaggttatgaattaccggcggaactggatgccgacaaagcattattagcccgcattgaatctatccgtctacaagcgggtaaagcaatgggcttaggtgatgtcagtaatatggttatccctaaacctgtgcttatttctccagcgcagaaaggcggggcaattaatgtgcgttattttatgccgcattcttgccatcgcgcgctggcgataaccggtgctattgctatttccagtagttgtgcattggaaggcaccgtcacccgacaaatcgtcccttctgtaggatacggcaatatcaatattgaacaccccagtggtgcgctcgacgttcatttaagtaatgaaggtcaggatgccacgacgttacgcgcatctgttattcggacgaccagaaaaatattttccggtgaagtttatcttccctgaaaaaattcgttgtcaggataaggacaatcaataaaggacttctgtatgagtcatacagaaagaacaggattttaaatgaataagaaaagcttatggaagctaattctgatattagcgatcccatgtattattggttttatgccagctccggcaggattaagcgaactggcgtgggtgctttttggtatttacctggcggccattgtggggctggttatcaagcctttcccggaacctgtcgtactgttaattgccgttgctgccagtatggtggtggtcggtaacttatccgacggtgcgtttaaaaccaccgccgtattaagcggttactctagtggtaccacctggctggtgttcagcgcgtttaccttaagcgccgcatttgtgaccaccggtttaggtaaacgtattgcctatctgctgattggtaaaatcggtaacaccacgctgggtctgggttacgttacggtattcctcgatctggtactggctccggcaacaccgtctaacaccgcgcgtgcgggcggcattgtgttaccgatcatcaacagcgtggcggtggctttggggtccgaaccggaaaaaagtccgcgtcgtgtcggacattacctgatgatgtccatttacatggtcaccaaaaccaccagctatatgttctttaccgcaatggcggggaacattctggcgctgaaaatgatcaacgacattctgcacctgcaaattagctggggtggatgggcgctggcagccggattgccgggcatcattatgctgctggtcaccccgctggtgatttacaccatgtatccaccagaaattaagaaggtggataacaaaaccatcgctaaagcgggccttgccgaactaggaccgatgaaaatccgcgaaaaaatgctgctcggtgtctttgtgctggcgctgctgggctggattttcagtaagtctctgggggttgatgaatccaccgtggcaatcgttgttatggcaaccatgctgctgctgggtatcgttacctgggaagacgtggttaaaaataaaggcggctggaataccttaatctggtacggcggtattatcggcttaagctccttattaagcaaagttaaattcttcgaatggttagctgaagtctttaaaaataacctggcatttgatggtcacggtaacgttgctttcttcgttattattttcctcagcattatcgtgcgttatttcttcgcttccggtagtgcctatatcgttgctatgttaccggtatttgccatgctggcgaacgtctccggcgcaccgttaatgttaaccgcgctggcactgttgttctccaactcctatggcggcatggttactcactatggcggcgcggcaggtccggtcatctttggcgtgggttataacgatattaaatcctggtggttggtcggtgcggtactgacgatattaaccttcctggtgcatatcaccctcggcgtgtggtggtggaatatgctgatcggctggaacatgctgtaaatattctcgtcatacttcaagttgcatgtgctgcgtctgcgttcgctcaccccagtcacttacttatgtaagctcctggggattcactcgcttgtcgccttcctgcaactcgaattatttagagtatatccatttattatctttctgcgcacttcacggtgcgcagatatctggagcatttgatgatcaagttatctgaaaaaggcgtgtttctcgccagtaataacgaaataattgccgaagaacatttcaccggcgaaattaaaaaagaagaagccaaaaaaggcactattgcctggtctattctctctagccataatacgtccggaaatatggataaacttaaaattaagtttgatagtttagcctctcacgatattacctttgttggtattgtacagaccgctaaagcgtccggtatggaacgtttcccgctgccgtatgtgctgaccaactgccataacagtctctgcgccgtcggcggcactattaacggtgatgaccatgtttttggtttaagcgcggcccagcgttatggcggtatttttgtgcctccgcatattgcggtcatccatcaatatatgcgtgagatgatggcaggcggcggcaaaatgatcctcgggagtgacagccacacccgttacggtgcattagggacaatggcagtcggtgagggcggcggtgagttggtaaaacagctgcttaatgacacctgggatatcgactatccgggcgtggttgcggtgcatctgaccggaaaacctgcgccgtatgtggggccacaggatgtggcgctggctatcattggcgcggtgttcaaaaacggttacgtcaaaaacaaagtcatggagttcgttggaccgggcgttagcgcgctctctaccgatttccgtaacagcgttgacgtgatgaccactgaaacgacctgtttaagttctgtctggcaaaccgatgaagaagtccataactggctggcgctgcacggtcgcggccaggattactgccagcttaaccctcaaccgatggcgtactacgatggctgcatcagcgttgatttaagcgccatcaaaccaatgattgcgctgccgttccacccgagcaacgtgtatgaaatcgacacactgaaccagaacctgaccgacattctgcgtgagattgaaattgagtccgaacgcgtggcgcacggtaaagccaaactcagcctgctggataaagtggaaaatggtcgcctgaaagtgcagcaggggattatcgcgggctgttctggcggtaactacgaaaacgtcatcgcggcggcgaatgcactgcgcggtcaatcctgtggcaatgacaccttcagcctggcagtttacccgagtagtcagccggtgtttatggatctcgccaaaaaaggtgtggtagcagatttgattggcgcaggcgcaatcatcagaaccgcgttctgcggcccatgctttggcgcgggcgatacgccaatcaacaacggtttgagtattcgccacaccacgcgtaacttcccgaaccgcgaaggctctaagccagctaatgggcagatgagtgcggtggcgttgatggacgctcgttctatcgctgcgactgcggcaaacggtggctatttaacctctgccagcgaacttgattgctgggacaacgtgccggagtacgccttcgatgtaacgccgtataaaaaccgtgtttatcagggctttgtgaaaggggcaactcagcaaccgctgatttacgggccgaacattaaagactggccggaattgggtgcgctgactgacaatatcgtcctgaaagtgtgcagcaagatcctcgacgaagtgaccaccaccgacgaactgattccttccggtgaaacctcttcttatcgtagtaatccgattggtctggcggagtttaccctgtctcgccgcgatcccggttatgttagcagaagtaaagcgactgctgagctggaaaatcagcgtctggcggggaatgtcagcgagctgacagaggtgtttgcgcgcattaagcagattgctggtcaggagcatattgatccgctgcaaactgaaattggcagcatggtctatgcggtgaaaccaggcgatggttctgcgcgtgaacaggcggcgagctgccagcgtgtgattggcggtctggcgaatattgccgaggagtacgcgactaaacgctatcgttctaacgtcatcaactgggggatgttaccgctgcaaatggcggaagtaccaacctttgaagtgggggattacatttacatccctggcattaaagcggcgctggataatccgggtacgacgtttaaaggttatgtgatccatgaagatgcgccggtaacggaaattacgctctatatggaaagtctgactgctgaagagcgcgagattatcaaggcgggtagtttgattaacttcaataaaaaccgtcagatgtaaaaagcgccatgtgaatgtaggtcgcattcggcacttattgtcggatgcgatgcttgcgcatcttatccgacctacgaatcgcatcgaatctgtaggccagataaggcattttcgcagcatccggcacttattgtcggatgcgatgcttgcgcatcttatccgacctacaaatcgcatcgaaccgtaggccggataaggcgtttacgccgcatccggcaaatagttaattgctcttacttcttcgcctctgcaaccactttactacccacgccgcggttattgtattcccacatgcggttgtagttagtgtcattcagattgcgctgtatttcgtcgttatcatctacgctgccggtattacccgcaaacggacgattagagatcaccgcatcggcccacggtttagccgtgttaaaaccttcgttgatggcgctatcacggatcaccacctgaccgttggtattggcatcaacatccaggctgcggcccagttgcgccacaccatcaccgaaagcattgaaacggctgtttacggcgaggaaaccgtagtaaatgttggacagcgtagccggtgcaaacacatacgcttcttgctgagtacgactgttcaccacgcggaattcggtgttatcgaacaccactgcgccgcgaccagaaacgatatccacatccccttcaatgtagctgttggtcaccagcgtacgcggctgacgattcgtttccagacggttctgcacaccgctgttggtgacaaagaaggtgttctgacgaccgagaatgttaacgttgttaatctgtacctggtcaccatcagtacgcagtgccaccgccggatggttacctgcatctacgctatcgcccagcgtgttttcgatggtcagattttgcagttgcaggccattgttttgactccagaagaccgcagagcagagaacaccgatactgtcgctgcgtttgctctggcagctatcgtacatataccacgctggtttacctggcatatatttgccgcgcgggttgacgtcgtgacgccagtcggcagggctcatgccaccatcaagggaaagcccaatcttcacatcaatcggtttttcacctgtaccgtacagagtaattccacccggagcggcagggacatataccgttccctgatactcaccaggcatcacggcaatatactggcgcttgttggtacgcttgataattgccgcatctaccgccgcctgaatcgtggtatgcgttacaccttgagtgcccgccgggccgacaacaaagtcaggttgcgcaggcagggtaatcggggaaggattccacgctgcagcacctggtgtcagggatgcaaaatagtgttgagcatcgaaattctgcgcttcttttgcgctcagaatcgggcgagaagaggtaccaggcgcggtttgatcagaaggacgttgatcgggcggggtactgctacaggcggtcagcgtcacgccaaaagccaatgccagcgccagacgggaaacactaaatgtgttcacaggttgctccgggctatgaaatagaaaaatgaatccgttgaagcctgcttttttatactaacttgagcgaaacgggaaggtaaaaagacaaaaagttgtttttaatacctttaagtgataccagatggcattgcgccatctggcagagtgattaactaaacatcgcagtaatgctggcgcttgccagagagtggaaatgaacgttaaacccgaccatcgcgccgctggcaccttcatcgacatcaatacgttctatatccagcgcgtgaacggtaaaaatgtagcgatgagtttcgcctttcggcggtgctgcgccatcgtacccggttttaccaaagtcggtacgcgtctgcaaaacgccgtctggcattgctaccagaccagagccaaacccttgcggtaatacgcgggtatcagcgggtaagttaacaactacccagtgccaccagccggagccggttggcgcatccgggtcgtagcaggtgacaacaaaacttttcgttcccgcaggaacatcatcccacgccagatgcggactaatattatcgccatcgtaacccatgccgttaaagacatgacgatgcggcaatttatcgccatcgcgcagatcgttactgatgagtttcatgaaccctcctttcttgtttgcagaaagtgtagccagaaaccctcacgcggacttctcgttattggcaaaaaaatgtttcatcctgtaccgcgcggttaaccgctgcggtcagacgctgcaactgttgcgggagaataatatagggcggcatcaggtaaatcagtttgccaaaaggccggatccagacaccctgttcgacaaagaatttttgcagcgccgccatattcaccggatgagtggtttcgaccacgccaatggcccccagtacgcgcacatcggcaaccatttcggcatcacgggcgggggcaagttgctcgcgcagctgtacttcaatatccgccacctgttgctgccagtcgccagattcgagaatcgccaggctggcgtttgctgccgcgcaggccagcggattgcccataaaagttggcccatgcataaagcaaccggcttcaccgttactgatggtttctgcaacctcgcgcgtggtgagtgtggcggaaagggtcattgtgccgccggttaaggctttaccgaggcacaaaatgtccggcgcgatttctgcatgttcacaggcaaacagtttcccggtacgaccaaatccagtggcgatctcgtcggcaatcagcaagataccttcgcgatcgcatattttgcggattcgttttaaccattccggatggtacatgcgcatcccgcctgcgccctggacaatcggctcaatgatcaccgccgcgatttcatgacgatgcgccgccatcaggcgggcaaagcccaccatatcgcgctcatcccattcgccatccatgcggctttgcggggcgggagcaaacaggttttctggcaggtagcctttccacagactgtgcatactgttatccggatcgcacacgctcatcgcgccaaaggtatcgccatgataaccattgcggaaggtcagaaaacgctggcgcgcttcgcctttggcttgccagtactgcaacgccattttcatcgccacttccaccgctacggaaccggagtccgcgagaaaaacgcactccagcggttgcggcgtcatcgccaccagtttgcggcacagctcaatggctggcgcatgggtgataccgccaaacatcacatggctcatggcatcaatttggctcttcatcgccgcattaagctgcgggtgattgtagccgtggatcgccgcccaccaggagctcataccgtcaaccaggcgtctgccgtcagacaaaatcagctcgcaaccttcggcgctcaccaccggataaaccggcagaggggaggtcatggatgtgtatgggtgccagatatggcgttggtcaaaggcaagatcgtccgttgtcataatcgacttgtaaaccaaattgaaaagatttaggtttacaagtctacaccgaattaacaacaaaaaacacgttttggagaagccccatggctcaccgcccacgctggacattgagccaagtcacagaattatttgaaaaaccgttgctggatctgctgtttgaagcgcagcaggtgcatcgccagcatttcgatcctcgtcaggtgcaggtcagcacgttgctgagcattaagaccggagcttgtccggaagattgcaaatactgcccgcaaagcagccgctacaaaaccgggctggaagccgagcggttgatggaagttgaacaggtgctggagagcgcgcgcaaagcgaaagcggcaggaagcacgcgcttctgtatgggcgcggcgtggaagaatccccacgaacgcgatatgccgtacctggaacaaatggtgcagggggtaaaagcgatggggctggaggcgtgtatgacgctgggcacgttgagtgaatctcaggcgcagcgcctcgcgaacgccgggctggattactacaaccacaacctggacaccagcccggagttttacggcaatatcatcaccacacgcacttatcaggaacgcctcgatacgctggaaaaagtgcgcgatgccgggatcaaagtctgttctggcggcattgtgggcttaggcgaaacggtaaaagatcgcgccggattattgctgcaactggcaaacctgccgacgccgccggaaagcgtgccaatcaacatgctggtgaaggtgaaaggcacgccgcttgccgataacgatgatgtcgatgcctttgattttattcgcaccattgcggtcgcgcggatcatgatgccaacctcttacgtgcgcctttctgccggacgcgagcagatgaacgaacagactcaggcgatgtgctttatggcaggcgcaaacagcattttctacggttgcaaactgctgaccacgccgaatccggaagaagataaagacctgcaactgttccgcaaactggggctaaatccgcagcaaactgccgtgctggcaggggataacgaacaacagcaacgtcttgaacaggcgctgatgaccccggacaccgacgaatattacaacgcggcagcattatgagctggcaggagaaaatcaacgcggcgctcgatgcgcggcgtgctgccgatgccctgcgtcgccgttatccggtggcgcaaggagccggacgctggctggtggcggatgatcgccagtatctgaacttttccagtaacgattatttaggtttaagccatcatccgcaaattatccgtgcctggcagcagggggcggagcaatttggcatcggtagcggcggctccggtcacgtcagcggttatagcgtggtgcatcaggcactggaagaagagctggccgagtggcttggctatagccgggcactgctgtttatctctggtttcgccgctaatcaggcagttattgccgcgatgatggcgaaagaggaccgtattgctgccgaccggcttagccatgccagtttgctggaagctgccagtttaagcccgagccagcttcgccgttttgctcataacgatgtcactcatttggcgcgattgcttgcttccccctgtccggggcagcaaatggtggtgacagaaggcgtgttcagcatggacggcgatagtgcgccactggcggaaatccagcaggtaacgcaacagcacaatggctggttgatggtcgatgatgcccacggcacgggcgttatcggggagcaggggcgcggcagctgctggctgcaaaaggtaaaaccagaattgctggtagtgacttttggcaaaggatttggcgtcagcggggcagcggtgctttgctccagtacggtggcggattatctgctgcaattcgcccgccaccttatctacagcaccagtatgccgcccgctcaggcgcaggcattacgtgcgagcctggcggtcattcgcagtgatgagggtgatgcacggcgcgaaaaactggcggcactcattacgcgttttcgtgccggagtacaggatttgccgtttacgcttgctgatagttgcagcgccatccagccattgattgtcggtgataacagccgtgcgttacaactggcagaaaaactgcgtcagcaaggctgctgggtcacggcgattcgcccgccaaccgtacccgctggtactgcgcgactgcgcttaacgctaaccgctgcgcatgaaatgcaggatatcgaccgtctgctggaggtgctgcatggcaacggttaataaacaagccattgcagcggcatttggtcgggcagccgcacactatgagcaacatgcagatctacagcgccagagtgctgacgccttactggcaatgcttccacagcgtaaatacacccacgtactggacgcgggttgtggacctggctggatgagccgccactggcgggaacgtcacgcgcaggtgacggccttagatctcagcccgccaatgcttgttcaggcacgccagaaggatgccgcagaccattatctggcgggagatatcgaatccctgccgttagcgactgcgacgttcgatcttgcatggagcaatctcgcagtgcagtggtgcggtaatttatccacggcactccgcgagctgtatcgggtggtgcgccccaaaggcgtggtcgcgtttaccacgctggtgcagggaagcttacccgaactgcatcaggcgtggcaggcggtggacgagcgtccgcatgctaatcgctttttaccgccagatgaaatcgaacagagcctgaacggcgtgcattatcaacatcatattcagcccatcacgctgtggtttgatgatgcgctcagtgccatgcgtagcctgaaaggcatcggtgccacgcatcttcatgaagggcgcgacccgcgaatattaacgcgtagccagttgcagcgattgcaactggcctggccgcaacagcaggggcgatatcctctgacgtatcatctttttttgggagtgattgctcgtgagtaaacgttattttgtcaccggaacggataccgaagtggggaaaactgtcgccagttgtgcacttttacaagccgcaaaggcagcaggctaccggacggcaggttataaaccggtcgcctctggcagcgaaaagaccccggaaggtttacgcaatagcgacgcgctggcgttacagcgcaacagcagcctgcagctggattacgcaacagtaaatccttacaccttcgcagaacccactagcccgcacatcatcagcgcgcaagagggcagaccgatagaaagtttggtaatgagcgccggattacgcgcgcttgaacaacaggctgactgggtgttagtggaaggtgctggcggctggtttacgccgctttctgacactttcacttttgcagattgggtaacacaggaacaactgccggtgatactggtagttggtgtgaaactcggctgtattaatcacgcgatgttgactgcacaggtaatacaacacgccggactgactctggcgggttgggtggcgaacgatgttacgcctccgggaaaacgtcacgctgaatatatgaccacgctcacccgcatgattcccgcgccgctgctgggagagatcccctggcttgcagaaaatccagaaaatgcggcaaccggaaagtacataaaccttgccttgttgtaaccattctgtatttggttaaattgcgagcgagatcgcgtcttcgattgactgcaatttaaccaattaaattctaaaataatcacgaaaaaaattttacttccgcctcatgcggcgaatgtgggaattgcccaggcggcgggggataggggctggagacagttatccactattcctgtggataaccatgtgtattagagttagaaaacacgaggcaagcgagagaatacgcggcttgcacgcgaattggcgttaaagacggctcaaagaaatatcttttattttttaactggttagataaatgcaatggcagtcactgaacaggcatctcttgccataaaactgtcatcactcatcttgacaaatgttaaaaaagccgttgctttggggataacccggtaaggccggagttttatctcgccacagagtaaattttgctcatgattgacagcggagtttacgctgtatcagaaatattatggtgatgaactgtttttttatccagtataatttgttggcataattaagtacgacgagtaaaattacatacctgcccgcccaactccttcaggtagcgactcatgagtaaaccgttcaaactgaattccgcttttaaaccttctggcgatcagccagaggcgattcgacgtctcgaagaggggctggaagatggcctggcgcaccagacgttacttggcgtgactggcagtgggaaaaccttcaccattgccaatgtcattgctgaccttcagcgcccaaccatggtacttgcgcccaacaaaacgctggcggcccagctgtatggcgaaatgaaagagttcttcccggaaaacgcggtggaatatttcgtttcctactacgactactatcagccggaagcctatgtaccgagttccgacactttcattgagaaagatgccagcgttaacgaacatattgagcagatgcgtttgtccgccaccaaagcgatgctggagcggcgtgatgtggttgtggtggcgtctgtttccgcgatttatggtctgggcgatcctgatttatatctcaagatgatgctccatctcacggtcggtatgattatcgatcagcgcgcgattctgcgccgactggcggagctgcaatacgctcgtaatgatcaagcattccagcgtggtactttccgcgttcgtggcgaggtgatagatatcttcccggcagaaagcgatgacattgcacttcgcgtggaactgtttgacgaggaagtggaacgattgagcttatttgacccgctgaccgggcagattgtttccactattccacgttttaccatctacccgaaaacgcactacgtcacaccgcgcgagcgcatcgtacaggcgatggaggagatcaaagaagagctggccgccagacgcaaagtgctgttggaaaacaacaaactgctggaagagcagcggctgacccagcgtacccagtttgatctggagatgatgaacgagctgggctactgtagcgggattgaaaactacagccgcttcctctccggtcgtggaccgggtgagccaccgccgacgctgtttgattacctgcctgccgatgggctgctggtcgtcgatgaatctcacgtcaccattccacaaattggcggcatgtatcgcggtgaccgggcgcgtaaagagacactggtggagtacggcttccgcctgccaagtgcgctggataaccgtccgcttaagtttgaagagttcgaagcattagcgccgcaaaccatctatgttagcgcgacgccgggtaattacgagctggaaaaatccggcggcgatgtggtggatcaggtggtgcgtccaaccggattgcttgacccgattatcgaagtgcggccggtggcgacacaggttgatgatcttcttagcgagattcgtcagcgagcggcaattaacgaacgcgtactggtcaccacactgaccaagcggatggcggaagatcttaccgaatatctcgaagaacatggcgagcgcgtgcgttatcttcacagtgatatcgacaccgtcgaacgtatggagattatccgcgacttgcgtctgggtgagttcgacgtgctggtagggatcaacttactgcgcgaaggtctggatatgccggaagtgagcctggtggcgatcctcgacgctgacaaagaaggcttcctgcgttccgaacgtagcttgatccagaccattggtcgtgcggcacgtaacgttaacggtaaagcgattctctacggcgataagatcaccccaagtatggcgaaagcgattggcgaaaccgaacgtcgccgtgagaaacagcagaagtacaacgaggaacacggaattacgccgcaaggcttgaacaagaaagtggtcgatatcctggcgctggggcagaacattgccaaaaccaaagcgaagggcagaggaaaaagccgcccgattgttgagccggataatgtgccgatggatatgagccctaaagcgttgcagcagaaaatccatgagctggaagggttgatgatgcaacacgcgcagaatctggagttcgaagaagcggcgcaaattcgtgaccagttgcatcagctgcgtgagctgtttatcgcggcaagctaacaggatagcgaagaagactgatgacaaacggaaaacagcctgatgcgctacgcttatcaggcctacattttctccgcaatatattgaatttgcgcggtttgtaggccggataaggcgttcacgccgcatccggcataaacaacgcgcactttgtcttcaataggaagccggaattttccttcggatttccgttaacctaaagcctgtaacgccttttccagcgcgttatgtaacaactggcggtcatgacgatacggaatatcgctggcctccagtacctcctggatcacaatccgctctttcaccgcgctgacatccacttttggcccgacgatgaccgcatcaatgacctttttaccaacatactgctccataattgccagcttgctttccagcttcaaattagccgcaggtaaactcaactcacgccccagattgccgatataaaccatcggcgctggcgtgcggcgtaatgcctgggcgatttccttcagcagcagaattggcatcaggctggtataaaaactgccaggcccaataatgatgagatccgcttcattgatagcgtgaaccgcctcacgcgttgcgggtacattaggcgttaacaataactcttgaatcggcgtagttaactggtcgatattgacctcgccgtaaacttcatgcccctgatcgtcaatcgccatcagatcaacaggatgctcactcattggaatcaaatgcgtatccactttcagcagattacgaattaaattgatggcttccagaggccgcacgctaaggtgatccagcgcctttaacatcaagtttccgagattatgaccggaaagttcgccattgccaccaaaacggtattcaaacatcgcggaggcgacgctcggttccgttatcagctggttgaggcagttgcgcatatcgccccaggcaatgccgccttcactacggcgaatacgccccgtgctgccaccattatcggtggtggtgacgatacccgttaaacgagaacccaaagagctaagactactgagaacgcgtcccagtccatgccctccgccgagagcaacgacacgatcaagatcagccagcgtacgattgcgcatatagtttcctggagtcagattatccgcgctacagtagcgcaaattgcggggaaacagcaattaacctgccaatattgaggatacaaactattttcttctacctctaaaggacgatgcacgctatgcctccctgatgatgtatatcaaagtaaaaccgccattttcccttattctgtagcgaaatagcacgatcatgacgctatatacatgattacatagcgaaagtgtggatggtaaaaatctcatttacacgctagtatcggcataaccactaaacactctagcctctgcacctgggtcaactgatacggtgctttggccgtgacaatgctcgtaaagattgccaccagggcgaaggaagaaatgacttcgcctcccgtatctggaaaggtgtacatggctagtcaactgactgatgcatttgcgcgtaagttttactacttgcgcctgagcattaccgatgtgtgtaactttcgttgcacctactgcctgccggatggctacaaaccgagcggcgtcaccaataaaggctttcttaccgtcgatgaaattcgccgggttacgcgcgccttcgccagactgggcaccgaaaaagtgcgcctgacaggaggagagccgtctttacgccgcgactttaccgatatcatcgccgctgtgcgggaaaacgacgctatccgccagattgcggtcacaaccaatggttaccgtctggaacgcgatgtggcgagctggcgcgatgcgggacttactggcattaacgtcagtgtcgacagtctggacgcccgccagtttcacgctattaccgggcaggataaattcaaccaggtcatggcagggattgatgctgcatttgaggccggttttgagaaggtcaaagtcaataccgtgctgatgcgtgatgttaatcatcaccagctcgacacctttctgaactggatccagcatcgccctatccagctgcgtttcatcgaactgatggaaacgggcgagggcagcgagctcttccgtaagcatcacatctctggtcaggttctgcgtgacgagctactgcgtcgcggctggatccaccaattacgtcaacgcagcgacggtcccgcgcaagtcttttgccatccagattacgccggagagattggccttatcatgccgtatgaaaaagacttctgcgccacttgcaaccgcctgcgcgtttcctccattggtaaactccatctctgcctgtttggtgaaggcggcgttaacctgcgcgatctgctggaagacgatacccagcaacaggcgctggaagcgcgtattagtgcggcgctgcgggagaagaaacagacccatttcctgcatcaaaacaacaccggtattacgcaaaacttaagctacattggcggctaaaacgtcaaaaggagagatcagatgagtcaggtaagcactgaatttatcccgacccgtattgctattcttacggtttctaatcgtcgcggtgaagaagacgatacctccggtcactatctgcgcgatagcgcgcaagaagcgggccatcacgttgtcgataaagccattgtgaaagaaaaccgctacgctattcgcgctcaggtatctgcgtggatcgccagcgacgatgtacaagtggtattgattacgggtggtactggcctgacggaaggtgatcaggctcccgaagcattgctgccgttgttcgaccgtgaagttgaaggttttggtgaagtgttccggatgttgagctttgaagagattggcacttccacgttgcaatctcgtgcggtagcgggcgtcgccaacaaaacgctgattttcgccatgccgggtagcaccaaagcgtgccgtaccgcatgggaaaatatcatcgcgccgcagctggatgcccgtacgcgtccgtgtaatttccatccacatttgaagaaataagtatgagccaactgacccatatcaacgccgctggcgaagcgcacatggtggatgtctccgccaaagcggaaaccgtgcgtgaagcgcgggcggaagcctttgtcaccatgcgcagcgagacgctggcgatgattattgatggtcgccaccacaaaggcgacgtatttgccactgcgcgtattgccggtattcaggcggcaaaacgcacctgggatctgatcccgctctgtcatccgctgatgctcagcaaagttgaagtcaatttacaggccgagccggagcacaatcgggtgcgtatagaaaccttatgccgcctgaccgggaaaaccggtgtcgaaatggaagcattaaccgcggcctccgtggcggcgctgaccatttatgacatgtgcaaagcggtgcaaaaagatatggtgattggtccggtacgtttgctggcgaagagcggcggcaagagcggtgactttaaggtggaagcggatgattaaagttctttttttcgcccaggtgcgcgagttggtgggaacagatgcaaccgaagtggctgcggatttcccaactgttgaagcgttacgccagcacatggctgcgcagagcgatcgctgggcgctggcgctggaagatggcaaattactggctgccgtcaaccagacgctggtgagttttgaccatccgctgactgacggcgacgaagtagctttcttcccgccggtaaccggaggttaagatggcagaaaccaaaattgttgttggtccgcagccgttcagcgtaggagaagagtacccgtggctggcggagcgtgacgaagacggtgcggtagtcacctttactggtaaggtgcgcaaccataacctgggcgacagcgtcaacgcattaaccctcgaacactatccggggatgactgaaaaagcactggcagaaattgttgatgaagcgcgtaaccgctggccgctggggcgcgtcactgtgattcaccgcatcggggaattatggccgggcgatgaaatcgtttttgtcggtgtcaccagtgcgcatcgcagcagtgcgtttgaagccgggcagtttattatggattatctcaaaacccgcgcaccgttctggaagcgcgaagccacgccggaaggcgaccgctgggttgaagctcgggagagcgatcagcaggcggcaaaacgctggtaattttttgttagccggataaggcaccgctgcgtccggcaatttcaccgctcagtacatacgtttacgctgcgtcgatgcacagcctcatcattttgcagtatccttaagatattccttatatcttcaggagatcgtcatggacagattcccacgttctgatagtatcgtacaaccccgggctggcttgcaaacttatatggctcaagtctatggctggatgaccgttggcttgttgctgaccgcatttgttgcctggtatgcggctaattccgcggccgtgatggagctgttgttcactaaccgtgtctttttaatcggtctgatcatcgcgcaattagcattggttattgtgttaagtgcgatgattcaaaagctgagcgcaggtgtaacgacgatgctctttatgctttatagcgcgctgacgggtcttacgctttccagtatattcattgtctataccgctgcttctatcgccagtactttcgtcgttactgccgggatgttcggcgcaatgagcctgtacggttacaccacgaagcgcgatttaagtggctttggcaatatgctgtttatggcgttaatcggcattgtgctggcaagcctggtcaacttctggttgaaaagcgaagcattgatgtgggcagttacctacatcggcgtgattgtctttgtcggattgacggcgtatgacacgcagaaactgaaaaatatgggtgagcagattgatacccgcgacacgagcaacctgcgcaaatattccattcttggcgcgttaaccttgtatctggacttcatcaacctgttcctgatgttgttgcggatcttcggcaaccgccgttaattctttttcaccatcactatcccggccatgtgtcgggatttttttcttactaaaaacgacacttaacaagtaccaggtataaaatatgccttatggacgagcggaagcgttttctgtatccataaatgcaaaagtattttgtatgcgtggttttaaatttattgatggtgaatattaatattttttctaaggataactaaaagaatggaaagttacagccaaaacagcaataaattagattttcagcacgaggccaggatattaaacggtatatggctcattaccgctttaggtttggtggcaaccgcaggactagcctggggagctaagtatatcgaaattacggcaaccaaatatgatagtccaccaatgtatgtcgccatagggttattattactttgtatgtatggcttaagtaaggatatcaacaagataaatgccgccatcgcgggcgtaatatatctgtttttactctctttggtggcgattgtcgttgcaagtttagttcctgtatatgccattatcatcgtgttcagcactgcgggcgcgatgtttttaatcagtatgctggccggtttattatttaatgttgatcctggttctcaccgttttatcattatgatgacgttgacagggttggccctggtaatcatcgtgaatgcggcattaatgagtgaacggcccatttggataataagttgcttaatgattgtgttatggagtggcattatcagccatggacgaaataagctccttgaattggcggggaaatgccatagtgaagagttgtggagtccggttcgttgcgcttttacaggtgcattaacactctattactattttatcggcttctttgggatacttgccgcgatagctataacgcttgtctggcaaaggcatacgcgtttttttcattaaccgtaaatgcacatactaaagaacttaactaaacttcacatcgccgcttcatttttcgcccgtagcttcttcgcctggctttccagcaacaggtaacagatcagcgccagcagcagtgggataaagtaatacagcacacggtaagcgagtagggcggcgataattgtacctttggaggtatgctccccagccagtagtgcgataaacaccgcttccagcacaccgatccccgccggaatatgcacgatgacgccagcaatactactaaccagtaacacgcccagtacaaagaaatagttcacgctttgaccaagtaacagccagataatcgcccccattaccatccagttaacgctggaaatcagcatctgagcgagggcgaatttccaactaggcagcaccagcttttgccctttgatggtcatatggcggtgcttcgcgaaagcgcaaaaccacaaataaaccgcgataatcatcagtaagccaatgccgagaatacgcagcgtagtttgatcgacataccagtgatccggcaactccaccacgcctgcggtaaagataatccctgccagtaaaatgtagcccagccagttggtggtaatactgaggctgaaaatccgcgtaatagtgctaccgggcaaccccagacgagagtacaaacgatagcgcataccaatgccgccgacccaggtactgagcgtcaggttgaaggcgtagcagataaagctcaccagcatcacctggcgcttcgccagtttgtgaccgcagtaaaagcgggcgagcaggtcatagcagccgtaaatcagatagctgacgaccaccagcccgaccgcactaagcagcgcaacgcgattgtagtcgcggatgaccttccagacctcttcccagtccacttttttggcgtagaccaccagcaacacaatcaccgcgataaaaaacagccaggtgaggatcttctttgctaagcgccagcgcgggtgacttttactcatcagggttttacccccgtgttttcagtttctacccgatcctgcgtttccattgtcggttgtgcgggcggatcaacctgcgccagacgtggcgtgtgtgccggaagccagccaaccagcgccgggaagtggcgtaaaaagtggaacgccagcacgcttttggtcaggttccaccaggtgcgtttgggcagcatggtttcatccacctgctgacaatctgcggcaataatgccgttcagattatcgcgcagcgtctggttaaaatgacgatcgtggatgatgacatttgcttcgagattcagactcaaactgagcggatcgagattactggaccctactgtcgcccagtgatcgtccatcaatgccactttgccgtggagcgggcggcggcggtactcaaaaacctgaacgccgcctttaaccagatagttatacagcaagcgcgcaccgactctgacaatcggcatatccggttcgccctgaatgatcagtttgatccgcaccccgcgccgtgccgctttacgcaaggcgtgtaaaaatcgatagccggggaagaagtaggcgttggcgataatcacttcccgccgcgcctgagtgagcattttcaaataatggcgttcaatatcatcgcgatgttcttcgttatcgcgccagaccagcaatacctgcgcttctcccggctggcggttctcttccgctttgtgatgacgtcgccaccagcgtcgtgccgcgctctgtccaggcaggttttccagctcaaactggagaatatcttcgacaatcggcccttcaaggcgtaccgcgtaatcctgtttagcctctggaccgtagctggacatatgctcggcggagtaattcagcccgccaataaaggctatacgcgcgtcgatcaccacaattttgcgatgcatccggcgaaacacattggtgcgcataccaaaaaggcgagggcggggatcgtagtagcggaacactacgccagctgccgtcagttcattgacaaactcatcgctgagatccgggctaccgtagccatccagcaagacttccgctttaaccccgcgttgcgctgctgccagtagtgccgcatgcagttgtttgccgacgtcatcctcaaaccagataaacgtttcaagaatgatgcgttcttgtgcctcgccaatcgccttaaacaccgcgggataatattgctcgccgttttccagcaactggatcttattgccttcgcgccagctacatttcataaatgaatctccgcacttaaaggggcatgatcagaaaggtgtcgccatgtccgcagcggcaacgcggttggcgcgctggcgctggcatttttgacgtagatcctgtccagtcgtagtagaggaaattgcaccggaaacgtgcgcgccgggcgtccgtgggcgcgggtaaaaatctcatccagtccggcctgcacttttaacggatgattagctttttgccgccagtcattgaaatcacccgccaccaataccggttcgccgtccggtagctcattcacccattcggcgagcatcgcaagctgcgcctgacggtgcgcctcacgcaggcccagatgtacgcacatcacatgaatcgcttttccggtcatcggcggcacaatgcggcagtagagcacgccgcgcttttccgcaccatcgacgctaacatcgcgattctcataatgttcaatgggataacggctcagtacggcgttgccgtgatgcccttccgggtatacggcattgcgaccgtaggcaaaatcgctccacatagtgtcggcgagaaactcgtagtggctggtatcgggccagttttccacatgcagcggatgaacttcgtgcgcgcccatcacttcctgcaggcaaacaatatcggcgctgacggtacgcacggcgtcgcgaagttccggcaaaatgaagcgtcggttaaacgcggtaaagcctttgtgaatattgatggtgagcaccttgaagctaaattgttgtgtttgatcgggcataattttcctgtctttgcctcttatctcattgaaatagtgtagtcggcgtcacaaaaaggtgcggtcttacggaattttccgtaaagttcggtactctgagtaagtagagataaattcttcaggagagaagccatgaagtggcaacaacgtgttcgtgtcgcaacgggtctaagttgctggcagattatgttgcatttactggtagtggcgctgctggtggtgggctggatgagtaagactctggttcacgtcggcgtgggattatgcgcactgtattgtgtcacggtagtgatgatgctggtgtttcagcgccaccccgagcaacgctggcgtgaggtggcagacgtgctggaagagctgaccacgacctggtattttggcgcagcgctgattgtgctgtggctgttgtcccgcgttctggaaaacaactttttgctggcaattgcagggctggcaatccttgccggcccggcggtagtgtctttgctggcgaaagataagaagttacatcaccttacgtctaaacatcgcgtacgccgctgattacatcaccttacgtctaaacatcgcgtacgccgcactccctgtcgtggccgttatcaccagtagcggccacaaactattccacacaatatccagactcgcatccttcaaataaatctgcttggtaatgtccgtaaagtggcgaatagggttaatccacgtcaggttttgcagccataccggcatgttttccaccggagaaacgtaaccggaaaggagaatggcgggcatcataaagacaaacacgccgataaacgcctgctgttgtgtactacagagactactaatcaacagaccgaatcccaccaggcttaaaccataaatcaccatcgtaaagtagaacagcgccaggcttccggcgaaggggatttgatacgcccagataccaatcgccagcacaatggtggcctggaaggtggcgacaattaacgccggtacggctttgccgatgaagatctgccaggtggtgagcgggctaaccagtagctgatcgagcgtaccttgttcacgttcgcgggcgacggaaagactagtgacgatcattacgccgatagtggtgatcatggcgatcagactcggcaccacaaaccatttgtagtcgagattcgggttataccagttgcgtaccaccagctcgctgttgttaggtttcggttttccttccagcagctcctgctgataatttttgacgatctgttgcaggtagttggcggcaatttgcgcactgttggagttacgcccgtcgaggatcaactgcaaaggcgcggtctggaaggtatccagtttgcggctgaagtcagccgggaaacgcaccagtagtaacgccttttgtgtgtcgatggttgggcggatctcctgtgggcttttcagcagcagcacatgagtaaaggcgctggcgcgggcaaaacgttgggtcagctccacgctatgctcgccgttatcttcatcgtagatggcgatggtggcgttagtcacttccagcgtggcggcgaacgggaacaggatcacctgaattagcacgggtaaaatcagaatcgcgcgggtttgcggttcgcgcagcaagctctgcaactctttgcggattaacgtccataagcgatgaaacatgctcttctccttaatccagccgacgtttggttttcagccacgtcaggccgataaacatcaccgcgctagcgatcaaaaacagcacgtttaccaccagcaccactggaatattcccggcgaggaacaggctttgcagggtgctgacgaaataacgagcgggaataatgtacgtcaccgcgcggatcaccgcgggcatactgtcgatctgaaaaataaagccggaaagcataatgctcggcagaaaagcggcgttcagggcgacctgagcggcattgaactggttgcgggtaatcgtggaaatcagcagccccatccccagggtactgagtaaaaacaggctggagataaaaaacagaatcagcaggctcccgcgatacggcacgccgagaataaacacactcaccagcatacacagcaacatcgccagcatcccgagaaagtaataagggatcagcttacacagcagcagttccgtgcgggtaatctccgtagagagcagagcctccatggtgccgcgttcccattctcgcgccaccaccaggctggtgagaatcgcgccgatgaccgtcatgataatggtcaccgcaccggggataatgaagtgctggctaatcgccgccgggttaaaccagtagcgggtttgtacatcaataagcggttcaaaagtctgcccgttgtcctccgctcgctgcatttgccagatctgccagatcccttcgacatacccctgtacaaagttagcggtattcggctcactgccgtcggtgatcacctgaatcggtgcggtggcgttggcgcgctccatctgttccgcaaaatccaccggaataaccaccagaccgcgaattttccccgcctgcattttggcgatcagttcctgacggttatcgctgatggtggcgtcgatgtaggggctaccggtcatggtgtgggtgaaatccagcgccgcttcgctacgctgttccagtaaaatcccgacccgcagcttgctggagtcgaggttaatgccgtaaccaaaaataaacagcagtagcagcgggatcactaccgcaatcagccagctactcggatcgcgaacgatctgccgcgtctctttaacgcacagcgcccgtacgcgacgccaggacaggatcgggttactcattgctatgctccttatcccagtcgtggatcaactgaataaaggcttgctccatggtgggatcgggttgctcatcgttagcgctctgtgctttcaaatcgtccggcgtgccgctggcgattaatttcccgcggtacaccaggccgatgcggtcgcaatattccgcttcatccataaagtgggtggtgaccatcaccgtgacgcctttctctaccatgctgttgatgtgcagccaaaattcacggcgggtgagggggtcaacgccggaagtcggttcgtcgagaaacagaatgtccggttcatgcatcaggctacaggccagcgccagccgctgtttaaaacctaatggcagttcatcggtggcgtgggaggcgatacttttcaggccgaacgcctcgctcatgcgggagattttttcgttctgcgcccgaccgcgtaagccatacacaccagagaaaaagcgtaaattctgttcgaccgtcaggttaccgtagaggctaaatttttgcgccatatagccgagatgctggcgcgctttaccggaactctctttcagatccatccccagcaccagcgcctggccggaagtcggcaccagcaaaccgcacatcatcttaaaggtggtgcttttacccgcgccgtttggccccagcaaaccaaaaatctccccacgtttaacggcaaagttgacgtgatcggtggcggcaaaatccccaaatttcttggtcagttctttcgcttcgatcaccgtctcgccgggtgtgccttctaccgtatgtaatattgcgcccagcgggctttcgctggttccggcaccgcccagcaaatcaataaacgcatcttcaaaacgcggcgtagtttcgttgatgttgatttccggcatcccgtcggcatggcgaatatcgtctggtgtggcctcttttttgaggatcagacgtacgcttttcccctgaatcatgccgtcgctgacctgcggcagtttcaaggcgcgttgcaacagtttgcggttgccctcgtgtggactggtcatcagaaagctgcgtccggccatggtttgtgtcagggcttttggttctccctgatacagcaactcgccttcgttcatcagtaacacgtcacggcactgctcggcttcgtcgagatagctggtactccagaggattaacatcccttcgcccgccagctcatgcaccatctgccacagttcgcgccgactgatagggtcaacgccgacgccgggttcatcgagcagcaacactttcggttcgcccaccagggtacaggccagaccgagtttttgtttcatcccaccggagagcttgcccgccaggcgtccggtaaacggcccaagagacgtaaactccagcaggcgagcaaaagtttgcttacgtgcctcgccggtgacgctgcgcaaatccgcgtacagattgaggttctccatcaccgtgagatcttcatacagaccaaatttctgcggcatataaccgagcacggcgtgcagcgcgccgtcgtttttgatcggatcaaagccaatcaccgtggcactgccgctgtcgggtttcagtaatcccgccaacatccgcatcagcgtggttttacctgcaccgtccggccccaccaaccccgtcacataaccggcgtgaatggtacaatcgagcggcgcgacggcgggcttgtccatgcccggaaagcgtttttccaggccgttcagcgtgataacggcatcattcatgtcctgcctcgtcaccgaattgtaccgtcactggcattccctggcgtaacgcatcatcggcgtcggtcaccacaatacgcaggcgatagacgaggtcggtacgcagatccggcgtttcgacggttttcggggtaaattcagcagtcgggctaacgaaaccaatctgcccgtgatacggcttgtccgggcgaccatcggtataaagcagcactttgcgccccggctgggcctggtcaagattacgttcatcaacataagcgcgcacccacaccggacgcgttagactaacggtaaacaccgtgccaccttcattgaggaccgtgcctggctccaccgcgcgcgttaacagcgtgccatcagacggggctatcaacgtactgtcctgtaaattcaactccgcctgcgccagttgcgcctgcgcctgttcgaggctggctttcgcctgagcgatgtcctgttcacggttaccggaacggtactgacgcaatttatcctgtgcacttttcagcgttgcctgcgcctggtcgcggctggagcgggcattttccaggtcatttgcgctaatagtgcggcttttccacaacccttgctggcggttatagaagttctgcgcatagtcataggcggcttgcgcctgtttcaccgctgcggcggcctgagcgatttcttcattgcgatacccggcaagcatcaggtcatactgcgcctgtgccacgctaacacccgctttcgcctgcatcagggcaatctcatacggcttgtgatccagttcgcccagcacctggcccgctttgatagcatcaccttcgtccaccgccaggctttcaacgcgccccccaacacggaaactaagatttaccgtacgaatatccacgttgccatacagcgtcaggccgttatcctggcggctttgataccaccagtagcctccggcaaccacggcggcaagtaccactaccgccaatccgatcacgacaggttttttcatcactacaaactcctttgcgataattacaaactcctttggcttaatccttgcaaaatcaggtcgatatgacaggtcaccgtctggttgatcagttcggtcttttcttcatcgaacgcggtccagccggtacgtaacagaattgtttctttgccaagacggaacgccagaatctcaccaatcaacgcatgggtatgaaggatcatgcgggtgtcattggcgtcgcagccggtccaggcggcaatcaggcgtgtcaggtggctgtgtagcggactaatcacctgttcgtgcaccaggtggtaggctgccgtgggagagagctgctcacgggagataaacttgctgaggttgacggtgtcatcctgggtgagcagcttaatcatgttcctgcaggcgcgaaggatcagttcacggatggcagcccgatcaggctgtggttgcgcgaacaagcgttcggcttcctcggcatgcggacggaactgctcgccaataaaatcggcaatccactgggcgcaggcgaggtacaaatcttctttgctaccgaagtagtaggtgatggcagcgatattctgcccggcctgggcggctatctcgcgagtggtggcgttcattccatattcaccaaactgcgccagtgcggcagcaatcagctgttttttcgcctgttcacccttgattgtcatggcaggattattcatcgcacagtccattcttaatcaaatgattgattaagattatgactccataggggagttgtccagtatggctaagaattttagcaacgccagtcacagggataatttatgcgctgcgtcacaaaaactgctacactccgctccctcatgacattgtggtttttgtcattttccttttcagtatctccctgaaaactacaccggtaacggtcggggcggttcggagtagttatgtctttcgattctttgggtttaagccctgatatcctgcgcgccgttgccgagcagggttaccgtgaacccacccctattcagcagcaggcgatccctgcggtgctggaaggccgcgacctgatggctagcgcccagaccggcaccggcaaaacagcgggctttacgctgccgctgttgcaacacctgatcactcgccagccgcacgccaaagggcgtcgtccggtacgtgcgctcattcttaccccgacccgtgaactggcggcgcagattggcgaaaacgtccgtgattacagcaaatacctgaacattcgtagcctggtggtgtttggtggtgtgagtattaacccgcagatgatgaaactgcgtggcggcgttgatgtgctggtggcaaccccgggacgtttgctggacctggaacatcagaatgcagtgaagctggatcaggttgaaatcctcgtcctcgatgaagctgaccgcatgctcgacatgggctttatccacgatatccgtcgcgtgttaacaaaactacctgcgaagcgccagaacctgttattctccgcgaccttctctgacgatattaaagccctggcggaaaaactgttgcacaacccgctggaaatcgaagtggcacgccgcaataccgcgtctgatcaggtgacccagcacgttcactttgtcgataagaaacgcaaacgcgaattgctgagccacatgattgggaaagggaactggcagcaggtgctggtgtttacccgtaccaaacacggcgctaaccatctggctgaacagctcaataaagatggcatccgtagtgcggcgatccacggcaataaaagccaaggtgcgcgtactcgtgcgctggctgattttaaaagcggcgatattcgtgtactggtggcaactgacatcgctgcgcgcggcctggatattgaagagctgccgcacgtcgtcaactatgaactgccaaacgtacctgaagattatgtccaccgtatcgggcgtaccggtcgtgcggctgctaccggtgaagcgttgagcctggtgtgtgttgatgaacacaaactgctgcgtgatatcgaaaaactgctgaaaaaagagatcccgcgcattgcgattccgggctatgagccggacccgagtatcaaagccgaaccgatccagaacggtcgccagcaacgtggcggcggcggtcgtgggcaaggtggtggtcgcggtcaacagcaaccacgccgtggggaaggtggcgcaaaatctgcaagcgcgaaacctgcagaaaaaccgtctcgccgcctcggcgatgccaaaccggcaggcgaacaacaacgtcgccgccgtccgcgtaaacctgccgctgcgcagtaatcttttatgccgggctatgcccggcatcaggctgatgaacaaacgcaaaactgcctgatgcgctacgcttatcaggcctacgtgaactctgcaatatattgaatttgcatgcttttgtaggccggataaggcgtttacgccgcatccggcatttcacaacaagcacttgtcagcaatttgagaacacgggaaaaaatttatctgttttaccgcccataagccaccgagacgttacttctctatagccaattgttcgcgcaactccattaaaaggtagcccagtcgattcttgcccttaccatgaccaccgtctccccagtaagcatcgttttccgtatgctcaaccagttttgcgggcgcggttgccagcaagagcgcacgcagttctgcatgctgttcgaatttagcgcgaagtgcttttcgcatcacctgttctttgacgctctcccagtttttacgcagaggcttagaacgatcgcgccccatgcgtgcggcgaccataggggaagaaacccgacggatctcttcgcggtatttttcatcaaggaatttttgtgcctgaaaatagtgttcactggtaggccaggttttcccgtcaaccttgatgggccaggcggcaaagttagaaaaatcaccgtagtcatcgctggtgctgtagaaatttatgatggtgtcttgcatgacgtgttggatcctttgtgctcgaacgggcattaaaccgcattatgttggtggttattgcgagccgctttccagaaacagaaaaaccattacccctgaaaaccgaaaaatgccacaatattggctgtttatacagtatttcaggttttctcatggcattaaccgccgcgcttaaagcgcaaattgccgcctggtataaggcgcttcaggaacagatccccgactttattccccgtgcgccgcagcggcagatgattgcggacgtcgccaaaacgctggccggagaagaagggcgacatctggcgattgaagcccccaccggcgttgggaaaacgctctcttatttgattcccggcatcgccattgcccgcgaagagcaaaaaacgctggtggtgagtaccgccaacgtggcattgcaggatcagatttacagcaaagatttaccgctgctgaaaaagatcattcccgatcttaaattcactgccgcttttgggcgtgggcgctacgtttgtccgcgtaatctgacggcgctcgccagtactgaacccacgcaacaggatctgctggcgtttcttgacgacgaactgacgccgaacaatcaggaagagcaaaaacgttgtgcgaagctgaagggcgatctcgatacttataaatgggatggtctgcgcgatcatactgatatcgctatagatgacgatctctggcgtcgtttaagtaccgacaaagccagctgcctcaaccgcaattgttactactatcgtgaatgcccgttttttgtcgctcgtcgggagattcaggaagcggaagtggtggtggcaaaccatgcgctggtgatggcggcgatggaaagcgaagcggtattgcctgacccgaaaaatttactgctggtgctggacgaaggccatcacctgccggatgtggcgcgggatgcgcttgagatgagcgccgaaatcaccgcgccgtggtatcggctacagctggacttgttcacgaaactggtcgctacctgcatggagcagtttcgcccgaagaccatcccaccgctggcgatccctgaacgtttgaatgcgcattgtgaagagttgtatgagcttatcgccagcttaaacaacattctcaatctctacatgcctgccgggcaggaggcagagcaccgttttgcgatgggcgaactgccagatgaagtgctggagatctgccagcggctggcaaaactcaccgagatgctgcgtggcctggcggagttatttcttaacgatttaagtgagaaaaccggcagccatgacattgtacgtctgcatcggttgattttgcagatgaaccgcgcgttggggatgttcgaggcgcaaagcaaactctggcggctggctagcctggcgcaatcttccggtgcaccggtgaccaaatgggcgacgcgggaagagcgcgaagggcagctacacctctggtttcactgcgtgggaatacgtgtcagcgatcagctggaaaggctgctgtggcgcagtattccgcacattattgtcacctccgcaaccttgcgtagcctgaacagttttagccgtttgcaggagatgagtggtctgaaagagaaagcgggcgaccgttttgtggcgctggattccccctttaaccactgcgaacagggcaaaattgttattccccggatgcgcgttgagccttccatcgacaacgaagagcagcatattgccgaaatggcggcctttttccgtaagcaggtggagagcaaaaaacatctcggtatgttggtactgtttgccagcggacgggcgatgcagcgctttctcgactatgtgacggatttacgtctgatgttgctggttcagggcgatcagccgcgttaccgtttagttgaactgcaccgcaaacgcgtcgccaacggtgagcgcagcgtgctggtgggcttacagagttttgccgaagggcttgatttgaaaggtgatctgctcagccaggtgcatatccacaaaatcgcttttccgcccatcgacagcccggtggtgatcaccgaaggggaatggctgaaaagcctcaaccgctatccgtttgaggtgcaaagcctgccgagcgccagctttaacctgattcagcaggttgggcgactgattcgaagccacggttgctggggcgaagtggttatctacgacaaacgcttgctgaccaaaaattatggcaagcgactactggatgcattaccggtatttccgatagagcaaccggaagtccctgaaggtatagttaaaaagaaagaaaaaacgaaatccccacgccgtcggcggcgttaatgatgtgagtcaggtaaggagtcgtaaatggactatcgcaaaatcattaaagagatcgggcgcgggaaaaaccacgcgcgcgatttagaccgggatactgcgcgcggtctgtatgctcatatgctcaatggtgaagtccctgaccttgagttgggcggcgtattgattgcgctgcgtatcaaaggagaaggggaagcagagatgctcggcttttacgaagccatgcaaaatcacaccatcaagctgacgccgccagcaggcaagccgatgccgattgtcatccccagttacaacggcgcgcgtaaacaggccaacctgacgccgttgttggcgattctcctgcacaaactcggttttcctgtggtggttcacggggttagcgaagatccaacccgcgtgctgactgaaaccatttttgaattgatgggtattacgccaacgttgcacggcgggcaggcgcaggcgaagctcgacgaacatcaaccggtgtttatgccagtcggcgcgttttgcccgccgctggaaaaacaactggcgatgcgctggcggatgggcgtgcgtaacagtgcacataccctggcgaaactggcgacgccatttgccgaaggtgaggcgctgcgtctttccagcgttagccatccggaatacattggacgcgtcgcgaagttctttagcgatatcggcgggcgggcgctactaatgcatggtactgaaggtgaagtgtatgctaatccgcagcgctgcccgcagatcaatctcattgaccgtgaagggatgcgggtgctgtatgaaaaacaggacactgctggtagcgagttactgccacaagcaaaagatccggaaaccacggcgcagtggattgagcgttgccttgctggcagcgaaccgattcccgaaagcctgaaaatccagatggcttgctgcctggtggctacgggtgaagcggcaactatcagcgacggcctggcgcgcgttaatcaggcattttaattcttttctcagccggatgagccatgtcatccggcttttaccccaccgcaatatgaaattcctgcatctttattgaccttcccacgcccggcgtgcagcataaaaatacaacaaacacataacataaacaggagttaaccatggaaagtggtcatcgctttgatgctcagacgctgcacagttttattcaggctgtatttcgtcagatgggtagcgaggaacaagaagcgaaattagttgccgatcatttaatcgcggcaaacctggcagggcatgatagtcatggtattggcatgatcccaagctatgtacgctcctggagtcaggggcacctgcaaattaaccatcatgccaaaaccgttaaagaggcgggggcggcggtcacgctcgatggcgatcgcgcatttggtcaggtcgcggcacatgaagcgatggcgctggggattgagaaagcgcatcagcacggtattgccgccgtggcgctacataacagccatcatatcggccgtatcggttactgggcggagcagtgtgcagcggcggggtttgtctctatccactttgttagcgtggtcggtattccaatggtcgcgccgttccacggtcgcgacagccgctttggcaccaatccgttctgtgtggttttccctcgtaaagataatttcccgctgttgcttgattacgccaccagcgccattgcatttggcaaaacccgcgtcgcctggcataaaggcgtccccgtgccgccaggttgcctgattgacgttaacggcgtgccgacgaccaatccggcggtaatgcaggagagcccgttgggtagcctgttgacctttgccgaacataaaggctacgcccttgcagcgatgtgtgaaattcttggcggggcgctttccggcggtaaaacgacgcatcaggaaacgttacaaaccagtcccgatgccattcttaactgcatgaccactatcatcatcaacccggaactcttcggcgcgccggattgtaacgcgcagaccgaagcctttgccgagtgggtgaaagccagcccgcatgatgatgataagccgattttgctaccgggcgagtgggaagtgaacacgcgtcgcgaacggcagaagcaggggattccactggatgcgggaagctggcaggccatttgtgatgcagcgcggcagattggtatgccggaagagacgttgcaggctttctgtcagcagttagccagctaaaaaaaagcccgtccagtggcggacgggcaaacaagggtaacataggatcaatgagggttagagcatatgcgtctgtcggcaaacagacagggaaatacttgtgctggacgtagcgtaaacgcctgatccgtccaacggttcggattttgtaggcctgataagacgcggtagcgtcgcatcaggcatctgttgccggatgcggcgtaaacgccttatccgtcctacgaattacttataaattaccgcagtaccgcttaatttattgttgttggtggcggaagtgatgctgtatccactggcaccggctgccgcggctttctcagccagtttcgcttccagggcatcgagggtggatgcgccatcggcagaaaccacgccgattttattcatgttctgtgcctgggatgccgttaccggttccgccgcgaacacgccaaaactcagagtactaagagccatagcagcaacaacagtattgatagttttcataattaatctctcgcaggtgatttttgtataagtgacgttgtttcgtcgatgtgatgagtatcacgtttttttacgagagataaaatcgaagagaattgaccgccttgttcaaataaattgattgatatctaacctactgataaaccatttatttgttgtacttatgaacttgttttataccgcgtggcagtcacagcagcgttaaaggcacggaatgacacgcaaaatacaaattatactcgctatgcatctcgccagttgtagttaacgtaactggctgtctttgctacctctgcgattatatcctgtataagctggtttttgtaaatctttctcctgctgacaatgaatacataagcgcacgccaggaatggcttcccgacgggcctgcgggatgggggcaccgcactcttcacattcatccaggctttcgccgcgcggaatttcaccccgagcgcgggcaatcgcatcttcaattgtactgttgatctgttcgttgacggcgtcatcgttagcccaaccggatgccatatcgacctccccatatcaatacttgtacagttaagtgtagctaatccagggacgaactcgggcagttcaagcatcagatctcgctccattcccgcagcagattatgataaagattaagcaggctcaggatctcttcactttcgccgtagcggcttttcaggctctgaatattgttgtccagttcaaacagcatggcgcgctttttatcatcgcggatcatgctctggatccacataaaacttgccactcgtacgccgcgggttacgggtgtcacgcaatgcaggctgctggagggatacaacacgagatcgcctgccgggagttttacccgatgttgtccgaaggtgtcattaacgaccagttcgccgccgtcgtagctttgtggatcgcttaaaaacagcgtggcagaaaggtcagtacgcatccagccgttttgtggatggctgcgtactgcgccatccacatggaaaccataggtttcattgttctgatagcgattaaacagcggcgtggaaagggtacgcggcaaggccgcggcaaagaataaagcatgttggttaaccgcgttcagcacctcattttgcagggcggcgtataacgtgctgcgggtgtcgacctgttgattgttcttaacttgcgcaccttgtgcgccggtggtgacgcgtccatccacccattcggcttgttccagttgttcgcgaaaacgagcgacgtcctgtgggcttaacacgccgggaatgtggtacatcatacaatttctccaaaaagtggggcctgcgccccacatctgaatcagaaatgcatattggctgtgagcaagaaggttcttggctcgcccgggtgataacggtagccgctcttgttgatactggcgacgtaatcggtatcaaacaggttgtaaacgtttagctggaagtcgagattgcgattaactcgataccccagtttggcatcggcgacccagtaaccttcggtaaacgctggcgttcccaccgcgccgtcactacctttatgcatactgccgatatagcgtgcgcccgcgccaacagagatatcgtcggttgcctgatattggctccataaggtgaaggcgtgctccggggtatacggcaggctactggaaccatcctgggcaacatctttgccgtttttgatggttgctttttgctgggtatagccgccaatcacctgccacgcgggagtgatattcccggccacggatatctcatagccttcgacgcgtttcttaccgtattggctgtaagttccgtcatcattttgctcaacttcattttcgatatcagtgcggaacagcgcggcggtgagcaacagacgtttatccagaacctgccatttggtgccaatctcgctggtgttggctttttgcggtttaaaatcggtgcggttggcactgttaccgctgccagactgcgcaagggcgaagttgttgccgcccggaggctgctgggaaacggcatagttaatatagacattgccgttttccgtcaggtgatacagcgccccggctttccagttcatcagattgccgctcttggcggtgtcgacggtggtgaccggagaaccttttgccacaccagttgggcaggtgatggcaccgcgtccgctgccgccgcaggcggtggcactgtcatattcagtatgataattatccagacggatcccgccgttcagctcaaaatcacgggtgatttgcagcgtatcaaaggcgtaaattgcgaaggtatccgtctgaccattggcgtttgcgccgttgcgcgtcaggccgccgggatgaatgctgctgtcaggatgataaatatttaccgcgggtaacgtcaccggattaacgccgtagttagtctgcgtttcacgggtaaattccacgccggtactgacatcatgaccgatagaaccggtatagaacgtgctggtcaggttggtctggttggtgagaattttattactcacatctttggtattcgccgtgcgactccaggtccagctattcacatcgctggtgggctgagtaatattgctcgccccgcccataatcgccgtcatcaggtaatcctgctttacgcggctccaacgggtagtattgcgaatggtggtgttatcgttgatgtcgtgctcaaaacgcatggtggcggtgtcggtggtgctatcgtcgtaatcggaatccgtgccgtaaaagttatgagtatcaacttttccggaatgattcagggccgccgttcccgcagatggggcagaatagcccggcaaaccgatggtcggaatgccgccgtctggcgtgttgtgctgggtgacatgcagataattaagatacaaacgattcgctgtaccaaggccaaaagcgacagaaggggcgacgccgtaacgctcatttttgactttgtcgcgtccggcatcgtgcgttttttcgcccattacattcaggcgcaccgcggtggtatcaccaatgacctgattgacgtccagcgtgccgcggcggaaccaggcgctgccaatactggcggaggcgtcaatgccggaatcattgcgcggctgcttgctgatcatattgatgctgcctgtcggtgcgctgcgcccgtagtcggtgccggacggccctttaatcacttcgacctgctcggtattgaaggtgtcgcggctgacgctgccgatatcgcgaatgccatcaatataaatactgttagaggtatcggcaccacgcatataaatggcgtcgccagtggtggagttaccgttctcacccgcaaaaaacgcacccacgccggggacgtttttgagcgcgtcggtaaggttggttgcgccctgatctttaatcacttgttcagaaattaccgtcatcgtgcgggtagtatccgctaccggacggctgaatttcggatcggcagattgttgtggcgcataaaggctaggcgtacttgcttcgacaaccagcgtgtcatccgcgttagtttgcccttcggcggcgagtgcctgagccacaggcgtgatgccaatacaaagaccggcaaagaacgtgaggctatgaaattgtctggcagggaaattgcgattgttttccattttgcaggtgactttttcttatatgttgaaattttcactgccacgagaaagcctctctgcggatgcgatgccactgttaatcccgtgatagtgctcgtgaaagtgataataattttgataagcattatcacttggagcgattttctatcacccattgcgcgaaaaagaaatacatttatttacattgagttcatatttgatgttttttgattacaaaacagacgaaaactgcatccagaggcgaatgcagttacgttggtggggttatttgtagatggttgcagtaccgaacatctggtcatttccgcctgcggaattaatgacataacctttcgcgccttgttcgcgcgctttttctgccagtttatcctccagatcgcttaggttacttgcgccagttgcgctaacggtaccggcgggccgtagctgaccgctgtccaggttactcatcggttgcgcggcataagccgtgagagagattccgctcaggacggtggcaatcagtagtgtgaggcactttttcataatgacatcctcataaatacaacgggtagtgcctgataagtgtaggtcgcctgcgcgatgcaaatgacgcaaaaaattgacagagatgtgcttattttttgaacgatatatttttacaaaataagacaaatcaatgacatgcataatgctgatttttatgatgaattgccataaaccatagccatgttaaggttttggggaatgataaacgcagccagatatttaccctgtcgcgttatgcgggtatcttacgccgctgcttaaaggagaatgctatgtccgcccagaaaccggggttgcatccgcgcaaccgtcatcacagccgctacgatctcgccacgctttgtcaggtcaatcctgaactcaggcaattcctcacgcttacacccgccggggagcaaagcgtagactttgccaatccgctggcggtgaaggcgctcaataaggcgttgctggcccatttttacgccgtagcgaactgggatatccccgacggttttctctgcccaccagtaccgggccgggcggattatattcatcaccttgccgatttactggcagaagcaagcggaacaattccagcgaatgccagcattctggatatcggcgttggtgcgaactgtatttatccgctgattggcgtacatgaatatggctggcgttttaccggtagtgaaaccagcagccaggcgttaagcagtgcgcaggcgattatcagttctaatccggggcttaaccgcgccattcgtctgcgtcggcaaaaagagagtggggcgatttttaacggcatcatccataaaaacgagcaatacgacgcgaccttgtgtaacccgccattccacgattccgccgctgcggcacgggcaggtagtgagcgtaaacgccgtaacctggggctgaacaaagacgatgcactgaactttggcggccagcaacaggagttgtggtgtgaaggcggtgaagtcacctttatcaaaaagatgattgaagagagcaaaggcttcgcgaagcaggtgatgtggtttacaagtctggtatctcgtggtgaaaacttaccgccgttgtatcgtgccctgacggacgtgggcgcggtgaaggtggttaaaaaagagatggcccaggggcaaaagcagagtcgctttattgcctggacctttatgaacgacgagcagcgccgccgttttgtcaatcgccagcgttaaagcgttggttcccccggcggtaacggttcagccggggtcgcgcccggagcaggcagcacctgataagtctgcactggcgcgcgaacgcccgccaggtcgaaatgttttttcacctggctgtcgagggcaaagcgtaccgtccactgtttgagtggcagcgtggtgaagctaacacgcagtgtaaacgcggtattgcttaagccgacaatcccggcaaaattcggttcaccaataatcagcccgcgaatttcttcgttttccattaattccgctaccgcatctttcagtgcctgattggctttatcagcatcttcatggcgatcaacatcataatttgccaccacgctaccaatgccgcggacaaagttagcaaaggtggttatgctagaccacggaatgatgtgatacgccccggtatcctgtcgtacgcccacggagcgaatgctcatccgttccactgtgccggtcaacggcccgatagtcaccaaatctccagtgttcatgccgttttcaaactgaataaataccccggtgataatatctttcaccagcgtttggctaccaaagctgatagccagacctaatgccccggcacctgccagcaatggcgcgatattgacgccgatttcgctcaacacaatcatgatggtgatggtactgataatcaccgccagcgcgttacgaaacagcgtaagcagggtacgcgtgcgggcgctgggtagcgggcggccatgaatatcgctagccagccggttttcgatcaaactggcgagcaccgtccagccaaccgcgctgaagaaaagaatgagtgcgatacggatcaggatatctacggttttctgccccgcgccgttttgcagccagttccagaaatcgaacaatccccatgcgctcaacagcaacattaccgccacgcagactgtcagaatacgcgccgttttcagcgccgcgctcagccagccattcaaccgtttttgcagctccggatagttacgctgagtatgtgggctgagagtgatggttttcgccagccagcgggaaaacataccggaaacaaacgctgcgataccaataatcgccaggctgcgcaccgttgcacccatcataaatttcaggctgttgcccggatcgaacaagctaaagaaaaacagcacgataaaataggcgcttgccagccagtgccacaccagcgcaaaggcgcggataaacaggctgaaaaaggccaggctatgctccgcgaagttgagcaaatgctgggtaatctcttttttattacgaaagatcaggtacaacgcccagacggtcatgcacagcataatgatgacgttcgccagcgcacctatctgtacattcacctgattagagataatcggcacggccacaatcaggccataacctatcaaactgcttaaccagctcaggcgacgactccagtaacgggcgctctcgtcctgaatcgtgaacgggcgcagctccgccacgtttgggcaaaaaatcaggcgtagtacggctttgaaaaattcaatgagggcaaaggcgttgagaaacaaactttgttggaaagcgatggtgcgactgcctgcattcaggttgtcgcttaatacctggccgacaaataatgtcagggccagtaacagcaggtcgataataaacgccccgataatcatcgccggaagctgcaaccagttactgcgctcacgatttttttgccgcgcccactgacccattttgcgatacagcggcagtgcgcacaggcgaatcagccagtaaaaaccaaacactaataccgctaacatactaaaatgggtcagcgcattgctgaaggtttgtggattaaacggcttatgcggggagccggtgatattgcgataaagttgcccgaagcgggcggaaagggcttcaccataatggcggctgacttcggtgaccttttgcagcacggtttgctcttcgaccagcgtcggcggcactatttttggtaccggttcagcagggggcgtagcggcaacggtgcgcaactggtcgatcaactctttacggctggtgtcattatccagcacatccgccagtgcgccataggccgcttttttttgttcgatatccggttccggggccggttcagtcgtactgtccgttgtcgttgtggttgtaacgccgggtatggataccgcgtgggcaggtgcgcccagcaggcagaagaggatgaacaggatccaccgcatgactcctccagtgagaaaatagagcaaaaagataagtatagatgctggaggaggggcgattttaaatgagaggaatctggtgtgcctccctttcgggtgaaagggaggaagggatattaagcaggttgctgacaacgtgcgggcttttttgccggatgcggcgtgaacgccttatccgtcctacaagttcatgcaattttaataagttgccagatatcctgtaggcctgataagcgtagcgcatcaggcaatgtgtcttattaagagacgtgctgcaaaaattcctgcaagcgctggctcggcgggttcttgatcaacacctgcggattgccatcttccgcaatccggcctttgtcgataaagatcagccggctagctactttctcggcaaaaccgatttcgtgggtcacgatcaccatcgtcatcccttcttcagccagatcctgcataaccttcagcacttcatggcgcagttccgggtcaagagcggaagtcggttcatcaaacagcatcattttcggcttcaccgccagcgcgcgggcaatcgccacacgctgctgttgaccaccagaaagttcggaagggtagtgatgtgcacgttctgccagaccgactttcgccagcagctcacgtgccagtttttccgcctcttctttgttcgcgccacgcacgcgtagcgggccaaacatgacgttttccagcgctgtcagatgcgggaagaggtaaaactgctggaacaccatacctgcttcctggcgaatcaggcgctcgtcaactttcggatcgttaaccttcaggccatcgacaatcagatcgccggaggtgatttcttccagtttgttgatgcagcgcagcagggtgcttttaccggaaccggacggcccgataatcaccacgacttcgccctgggcaatgttcaaatcgatattgtgcagcacctgggttgggccaaagtgcttggagacgtttttaaattcaatcacaggattttcatccttctttccagacgacgcagaataaagctcagcaccagggtaataatcagatagaacaccgccacggcgctccagatctcaagggcgcggaagttaccggcaataatttcttgcccctgacgggtcagttccgccacgccgatcacaataaacaggctggtgtctttaatgctgatgatccactggttacccagcggcggcagcatacgacgcagtgccagcggtaaaatgacgtagcgaatggtttcccaacgactaagaccgagcgccagtcctgcttcacgaaaacctttgtggatagacagcaccgcaccacgcgtgatttccgcaatatacgcgccggagttgatcatgatggtgaccaccgccgcagtaaatgggtcgatgcgtaagtcgttaaacgccatcggcagggcgaaataaataaacatcacctggacgacgataggtgtgccgcggatcacttcaataaagaccagcgcgacgtggttggctatccaacctccgaaggtgcgtgcaaaacctgccagcaatccgattaccagaccgcctgccagaccgaggacgctaatccacagggtcattttggcaccttcaatcagaagcggaatggcaggccagatggcactccagtcaaactgcatatgttgttcctgttaccgtggtgtaaataatcaaattcagggtaattaatggccccggagcgggtttgcgcccctcaccctaatcctctccccataggggagagggaactgccagtgcgttttacaggtgtagcgttattatttcggttcagtaccgaaccattttttgtagatttcgttgtaagttccgttctcgcgcagggttttcaacgcgccgttgactttgtcacgcagctcgtcgctacctttcgggaacgcaataccgtattgctgcgcttccagagagtcacctaccgctttgaactgaccgttaccggcggttttgatgaagtacagaatgtttggcgtatcgtgcagaacggcgtctgcgcggttggtgcccagttccatataggcgttatcgatgttcgggaactgacgcagatctttagttttgatgtttgctttcgcgtaatcaacggagccagtaccgctcttcacagcaaccactttcccgtcgagatctttcacgcttttcacatcgttattgttagctttcaccatcactaacaggccgcttttgtagtagccgtcagagaaatcgatcgcttttttacgctcgtcggtgatggtaatgcccgccagcgccagatcgacgtttttggtttgcagtgccggaatgatcccactgaaatccatcggcttcagttcgtaatccagcttcagctctttagcgatggcagcccacagatcaacgtcaaagcccacatatttatcgccctgtttaaattcaaacggaacgaaggcggtatccgtcgcgacaactaattttttatccgcggcatgagaagaaaccgcaaaagccagggtcagtgcagccagactaacttttaatacagacttcatagcatttccttttttctatccacgggacgatcccctgcgtgacattcacatatatgaaaaaatcgtgccagttttgcaactccttgatttttcgagatgcggcaaaaacgtgatgcacgatttatagggcaataccctgaagatgcaccattctggggcaccaatctggtgcgctaaaattgtgcactcaacacagtgattatttagcgtaaaacctgatgaaaaaacaatctttatgtaacgattgtgtgatgatgtggatacaaaaaatttacttaatcagctggagatagcagatggatgcactaaataagtgcgttgaggtgggctgcaaaacaaaacggcctcctgtcaggaagccgcttttatcgggtactaaagttctgcaccatcagcgatggatttattcgatgttagactcgataaaccacaggaatttatccaggtcgcgagacgcggcggtcaggatatctgcggtgtcgtcatctttcgcttcgccaatcgctttgcgtacgtcattagcgacgattgcgtaacggtcagccagttctttcaggtgatcctgaacgttgtggatgtccagcgggtaacttttcagcggggttttgctgttgataacttgagtggtccccagagctacaccgcccagctgcactgcacgttctgccatggtatccagatgatcgatcagtgcggtgcggaagccatccagcatttcatgtacggcaatgaagttagcgccgcgcatgttccagtgcgcttgtttggtaatcaaagaaagatcaataaactggataacctggcgattcagcaactctactgttgcttttttctcgctgtcggagacatcgttgcgggtataaagcagattggtcgctttacttttaactaatttagcggtactcataatttcatatcctcttgatgttatgtcccagtaattaacgagattaagtatagcaccggctatgtgttccgctattctggctgttcctatcacactaatagtggtaacaagcgtgaaaaacaaaactaataaagattcaatgagttagatatattgataagaacaattcttatttatctgctcgccaggaattttcggaataaatatgcttttgcataattcgatatataaagacggtgtagaggaaaagtagcgagaaattctgcatggttatgcataaccatgcagaaatgtaaatttaattaatgtctaattcttttattttgctctctttgcgtactgtcagcgtagaccccatactagcggcgatgatagcgccgagcgccagtagctgtatgggtgtcagtgtttctccgaggaaaatcatcccggaaacggcagccagcgccggttccatgctcatcagcgtaccaaatgtccgtgttggcaaacgggtgagggcaatcatttccaggctataaggcagagcggtgctgagaatagcgacagccagacccaatggaataacgctccagtgccagagtgcttcaccagcctgaagcgctccaattggcacgaaaattaacgctgcaatcaagctaccaattgccaccgtcgcagggccatgttccgctcctgcgcgttgcccacttaaaatgtaaatagcccaacaagccccggcccccagtgccagcgcacagccggttaaatcgacatgggaaacgtcttgccccagcggtagcaggaaccacagaccaagaaccgccagcacaacccagacgaaatctaccgggcgacgagaagagaacagcgccaccgccagtggtccggtgaactccagcgccaccgcaatacccagcggtactgtctgaatagaaagataaaaaagataattcatcccacccaggctaacgccgtaaaacaacagcggtaaccgttgctctttggcaaagcgcagtcgccatggcttaaagaacgcgatgaggatcagcgttcctaatgccagacgcagcgcagtgacacccggtgcgcccaccagaggaaaaagactcttagctaagctggctccaccctgaatagacgccatggcaacgagcaatatgactattggtaaccagaccggcattttacgtaaactaccaggcatcctttctcccacaaatatctagacttaagtaaagcgtggagtgtactggatatacccaatgctggttgagcatttgttgaaaaaattttcccccgttttgactaaaatgcgccaggattgatggaatcattagtctggtgattaggaataatctggatgaatgacagggaaaacatgcgtaatacttacgcagttctctgaaaaagtgatttaaatttagatggatagcggtgtatggaaacgttctgttacatgaaatggcccgttagacatcacaaatcgcgaagagtttcccattaatttttgatatatttaaaacttaggacttatttgaatcacatttgaggtggttatgaaaaaaattgcatgtcttagtgcactggccgcagttctggctttcaccgcaggtacttccgtagctgcgacttctactgtaactggcggttacgcacagagcgacgctcagggccaaatgaacaaaatgggcggtttcaacctgaaataccgctatgaagaagacaacagcccgctgggtgtgatcggttctttcacttacaccgagaaaagccgtactgcaagctctggtgactacaacaaaaaccagtactacggcatcactgctggtccggcttaccgcattaacgactgggcaagcatctacggtgtagtgggtgtgggttatggtaaattccagaccactgaatacccgacctacaaacacgacaccagcgactacggtttctcctacggtgcgggtctgcagttcaacccgatggaaaacgttgctctggacttctcttacgagcagagccgtattcgtagcgttgacgtaggcacctggattgccggtgttggttaccgcttctaatcactttggtgatataaaaaatccgcctctcggggcggatttttgtttttaaggtttcgggtcgaaaatatcggttccgagatggttgtaatccaccttctgtaactggaagttggtgatgtatatcggcccggctttcttctcagatataaacgggtatttgatgttaatttccttcgctttaatccccgtccactgggagaaaaagcctaagaagtcattggcactgcggcgggctttaatcacacgatgcgctttatcgtcgctggaaatgaccataaaaggcacctggaaattttgctgatatttatcatcatgggcaaggtattgcacgtctttaccgcgctctttaaaggccagaccgtggtcagaaaagtaaaccaggctgaagctgctgccgctgttgcgtaactgatcgtacagcttgcgcagtaaatcgtccgtttgcgtcatggtatagagatagcagctcgtttctttgctttgcacaaaggtttcgtattttccttgtgtcctgtcgcaggcctgcggatgactgcccatcagatgtagaacaatcagctgcggttggctgtgctcttgcgccagcacttgagcggtcatatccagtaacgcttcgtctttggtgtttttatctgcttcaaaattaccttctttcaggaagtacacttcatctgctcgtttggcgatgctggcgatagcggtatcgtattcgccgatttgaccctggttggaaaaccaccaggtctggaagcccgcgcgatttgccagggtgacaaagttatcctgaaactgtggtttgccatcgacaacgcgattgagcgttaagccaaggcttttctgcgtggagccactggcggcaatgtagtcagcaaatatcaaaccgttaacgctgctggcaaacggggtattgtcccagtgaccgccaaaggcaccgagggcatcgcgacgcgcgctttcaccgatcaccaccacataggtctgatacttcggcttaacggcagtgaccgtccaggtatctttcattccggaaagttttgccatccgttcttgctcttcaatcacctcgttattattgacgatgacatccttagcaaaacgaaataccggatagccagtatctttcagtttaaatacgccaccccaggccaggttttgcacgggagcaacaaaaaatgtcgccacactgaataccagacacaggctgtcgaaggtattccagcgcgctttttcattctctttttttcgcctgattgctattacgccgagcgcaaaaataaataagccgaccaggtagctgtaccacggaaaaatcgtcaggatttcggtgctctcttccatattggtggagtgcaatgccagcaatgtattgaaattaggcgcgccgtaggcctgagcaaaagggaaataacaagccgccaccaggctactgacaccgaccagaactttttgtacgcgaggcaatgttcgccatagcaaaagcaaaatagccgtaaacgcagcggtgtagagcaaactgaaggggtaacctaagccgaggttaattaataggctctgtaaaaagtagaacgcagtccacgggctaaatacccggctacgggtaacaaggctttctttgagggttaaattcatatgccactatcgtaacaaacgccatgtgcttaccctggcgtcaagggtcaatacctgcaagagtgcgtgaagagtggaaaggggtccgcatccgcgagccgcaatatacgcagggctgcaagaagatagagcgagccgccgtagtggtcaactactgacgaacaaatcttttgcgaaggggattgcaaatccgacaaaaagtggggtttttcagaccaaaacgcgttatgcctgcatgaaagcaggagtgaagcggcgtaccgcgacgccgctatttatcggaaggtttatcttgctgcggtttgttgttgaccatatcgcacaacatagagagcagcattaaccgtactttaaagggagaatgactaaacacgcgcatacacctcttgaactcattcataagacctcctgacttgctaatcccgtcgatccttgagggatgattgcattacatacagatatagcacaggctatattatatagctattgctaaaacgttaattttttgtaccttcgcaactctggtttacaatgtgcgcacgaaatgagaacgctatgtatgcgtcaccataatgaggaagcacaatgagtcgtcgcgcaggtacgccaacagcaaaaaaagtgacgcagttagtgaacgtggaagagcacgttgaagggttccgccaggtcagagaggcgcatcggcgcgagcttattgatgattacgttgagctgatttctgacttgatcagggaagtgggggaagctcgtcaggtggacatggctgctcgtctgggagttagccaaccgacggtggctaaaatgcttaagcggctggcaaccatggggctgattgaaatgatcccctggcgtggcgtgtttttaacggcagaaggagagaagctggcgcaggaaagccgcgagcgacatcagatagtcgaaaatttcttgttggtgttgggcgtcagtccggaaatcgcccgtcgcgacgcggaaggcatggagcaccatgttagtgaagagacgctcgacgcttttcgtttgtttacccagaaacacggtgccaaatgagcctgccttttttacgcacgctgcaaggcgatcgtttttttcagttattaattcttgttggtatcggattaagctttttcgtgccctttgcaccgaaatcctggcctgctgctatcgactggcacaccatcatcaccttaagcggcctgatgctgctgaccaaaggtgtggagttaagcggttattttgatgtgctggggcgcaaaatggtgcgccgctttgctacggagcgtcggctggcgatgtttatggtgctggcggcggcgctgctttctacctttctgaccaacgatgtcgcgctgtttattgttgttccgctgactatcacgctaaaaagactgtgtgagatcccggttaatcggctgattatttttgaggcgctggcagtcaacgctggtagcctactgacgccaattggcaacccgcaaaatattcttatctggggacgttctggtcttagctttgccggatttattgcccaaatggcaccgctggctggcgcaatgatgctgacgctcctgctcctgtgctggtgttgtttccctggaaaggcgatgcaataccatacgggggtgcaaacaccggagtggaaaccgcggctggtgtggagttgtctggggctgtatatcgtctttctgacggcgctggagttcaaacaagagctgtggggactggtgattgtggcggcaggctttgcgctgctggcacgtcgcgtggtgctcagtgtggactggacgctgctgctggtgtttatggcgatgtttatcgacgtccatttactgacccagcttccagcgttgcaaggcgtgttgggtaacgtgagtcatctatctgaacccgggttatggttaacggcaatcggtttaagccaggtgatcagtaacgtgccgagtaccatattgttgctgaactatgtgccgccgtctttattactggtatgggcggtaaacgtaggtggctttgggttattacccggaagcctggcaaatttgattgcgctacgtatggcgaacgatcgccgcatctggtggcgtttccatctctatagtataccgatgctgttgtgggcggcgttggtgggatatgttttgttagttatactcccggccaactaaggtctggcaaataaaaaaggcggattatgagtccgccttttgctttaagttttgaagattaattcagacgaaccggcatcccggagcggtttttaatcgcttcatcaagaacaacctggtcaacatctggctgaccggtcactgtctgcacgctcttcgtcagggtaattggcacaatttcctgaccttcaaactgggcttcggtggtagacagcgggttatggacttcaatataacggctgccgtctggctcggtggtcgcttttaccggctcatcaataaactgtacgcgggtaccgaccggtactttctcgaacaggaatttgatgtcttcgttacgcagacgcacacaaccatgacttacacgcaggccgataccgaagttggcgttggtgccatggatagcatacaggcgaccgatatagagtgcatacagccccatcgggttatccggacctgccggaacgacagccggaagcggttcgcccgcagcgcggtactctgcgtgcattttggcggtcggcgtccaggtcgggcctgcttttttacgctcaactttggtggtccagttgataggcgtatctttgcctaactgaccaatgccgatcggcagcacgataacggtgttggtccctttcggatagtaataaagacgcatctcagcactgttaatgacgatgccttcatgaacggtatccggcaggatcagctgctgcggaatgttcagtacagtaccgcctttcggcaggaaggtatccacacccgggttcgcttccatcatattggaaagccccatctggtactcggcggcaaaatactccagcggctgagtgttaccttcaggaatggtgatcacctgattctgaccaaccaggcgactcccgtcggttggcagaggataagttaccgcagaggcggtactgcaaaagccgacaacagcgaaggccgctgcgaataatgttttcaatttcatattcatgttaagcgagattttgtgcctggcaggccattgggttgagaatattagagtattggaagcgcattataagttcattccagctcacagtgaaatcagatgtgtacgaaatcacattttttgcctttggcttgagtgtagaccttaagcgaggagcaggatcttctttcagacttatggcataatgcgcggtttgtcatatctcttttcaggatacgcctgtgttagtttccagtaacgtcaccatgcagttcggcagtaagccgttgtttgaaaacatttccgtcaaatttggcggcggcaaccgttacggcctgattggcgcgaacggtagtggtaaatccacctttatgaagatcctcggcggcgaccttgagccgacgctgggtaacgtttccctcgatcccaacgagcgcattggtaaactgcgtcaggatcagtttgcctttgaagagttcactgtgctggatacggtgatcatggggcataaagagttgtgggaagtgaagcaggagcgcgaccgcatctatgctttgccggaaatgagtgaagaagacggctataaagtggccgatctggaagttaaatacggcgaaatggacggttactctgcggaagctcgcgccggtgaactgttgcttggcgtgggaattccagtggaacagcactacggcccgatgagtgaagttgctcctggctggaagctgcgtgtgcttctggcgcaggcgctgtttgctgatccggatattctcctgctcgacgaaccgaccaacaacctcgacatcgacaccattcgctggctggaacaggtgctgaacgagcgtgacagcaccatgatcatcatcagccacgaccgtcacttccttaacatggtctgtacccacatggcggatctggattacggcgagctgcgcgtttatccgggtaactacgatgagtacatgacggcggcgacccaggcgcgtgaacgtctgctggccgataacgccaagaagaaagcgcagattgctgagttgcaatctttcgttagccgctttagcgccaacgccagcaaatctcgccaggcaactagccgcgcgcgccagattgataaaatcaaactggaagaggtgaaagcctccagccgtcagaacccgttcatccgttttgaacaggataagaaactgttccgtaacgcgctggaagtggaaggtctgaccaaagggtttgataacggtccgctgtttaaaaatctcaacctgctgctggaagtgggtgaaaaactggcggtactgggtaccaacggcgtcggtaaaagtacgctgctgaaaacgctggtgggcgatctgcaaccggacagcggcaccgtaaaatggtctgagaacgcgcgcattggttactatgctcaggaccacgaatatgagtttgaaaatgatctgaccgtgttcgaatggatgagccagtggaagcaggaaggcgatgacgagcaggcggtacgcagtattctcggtcgtttgctgttcagccaggacgacatcaaaaagccagctaaagtgctttccggtggggaaaaagggcggatgctgtttggtaagttaatgatgcagaagccgaacattctgatcatggacgaaccgaccaaccacctggatatggaatccattgagagcctgaacatggcactggaactgtatcagggcacgctgatctttgttagtcacgaccgtgagttcgtaagctccctggcgacccgcattctggaaatcaccccggaacgcgtgatcgactttagcggtaattacgaagattacctgcgtagtaaagggatcgagtaagtgattatccgtcaccccgatactgtcggggtgacggcggctgatgacaaatgcaaaatagcctgatgcgctacgcttatcaggcctacgcagtacctgcaatatattgaatctgcaggactttgtaggccggataaggcgttaacgccgcatcaggcattaacaaagcgcatttgtcagcaatctgagtaacgtcgaatcgattttcttaatcccacatcaattcacttccattaattctcaaacatccatgcccaacgctcgcttaccgtgaatgttgaggtcggcaagcgtaaagcgtccttcccagtttgtttcatagtcctcgcgcgggaagtcgcccgggcttgcgcctttttccagtgcggccttcaccttgtgcgcgtaggcaagatttttctcgcacatcggtgccgcaggaatgtacatcacgttgccccaaccttgttgattttcaacgggggcaacggaatggatgacgtcgcagtgccaccagacggagtctccggcttcgagttttggaatgctggttaacgcctcaatcaacagtggatgccattgctcacttaccggcaatactcttccgggcgctacgccgcacagttcatcctccggcacatcatcaagcagcggacgtaacagtacgtacgccatagcttcaggaatgggcacgacgtgcagcagcccctgaccaggcagcatatcagagagcgctgtccagccctggaatgtccgaaacacggaacatttggtggtgttgtccaccgtgtactcttcaacttccgtacgatgtgccgcatgccagggatcatattgcgccagattgccattaaagacgttggcgaaaacgcgctgatacgctggaagcagccagcgttccagtgccccggagtcggtatgcgctccaagacctttggaggtcgttccgggcggacggcggcggatacggtcagggtagatgacgctcacatccgggttaaaccattgctttccatcactttcaaatgtccacagacgattgagaaagctctgcgcattcgccatttcttcactctggcgggcctgcatttgcgcctggctccagtagatggggtaaatctcgggacgactagcgctgagcgtcccgaagaaattatcgccggggcctttgtagacctcgtcaaagcggttgcggtccagatagtccagcatgctctgatcccagcctagcgcttgttcgcgggggaaatggccttttatcaccgcacaaccgcgacgtttaatctgttcgcgctgctctgcagtaacatgacctgctttgatatcggcataagacagcaccggccagacggcatcgccctgtgctttgagtgcgttgatttcagccactcgcgtggcaatgtcatcgcttagctgattaaagatctgctggacgtcgccaagctgcgcccgcagcgcgtgcttcatctgacggatagctgctttgtgatcggcaggcaatgtgtcgctggtaaaagtagaagccataaccacctctcattaactttcattcgaaaccattctgatttgcatgtgacaatataagttataaataagttaatgcaagtttaatgatttgatgtgatgtacaggatgtaaaaagaagggaaaaccggagcgcacggctccggtagagaggtcagctgttaaaaggggatgtgttatccagcaccgcctgaatcacattcagcgcgccttcatgattattatcatcggtagcgtaacgggcgatttgtttaatgttttccgcagcattgcccatcgcaaaggaataacgcgccattttcagcatctccgcatcgttaccgctgtcgccaatcgctaccacattttgcggactcagatcccagcgtttcagtaaccggctaataccgtttgctttatgtagaccgggaataatcaggtcgataaagccaaaaccactggtaacgggtttcataatgccatcgagcgctacgtgcagtttgtcgatcactaacgggatttgttcatccggcaggttgaggctaaacttgaacagtacgtcgtcaatctcctgataatcttttacaggtttcaggcgatggtagtgttttgccatcagtgcgacaaatgcttcgggggcattttcgctgacatatgcactttgcagaccgcaggcgacaaaattgagttgcttatcttttagcaactcgccaataacaatccggctttcatgtcgggtcagttcgccgtggaacaactgcttgccatgttcgtaaaccagtgcgccgttttccgcgacaaaagagatctcatcctttagctcaggaaagaaactaataagctggtaatactgattaccgctggcaacaacgaacttaatgccgcgctttttcagttcctgatattgcgccataaaacgtggttggttgtacgttttggcgtcgttaagaaaagtaccgtccatgtctgtgacgataacttttacgctcataggtgtgctcctggctcgaaaatgaaaccgtaacagtgtaataacaatgtgacgcagagcacaaattatatttcgaatgaaagtaaggatgaaattgatgatgtgaatgatttagcccggcgacgacgccgccgggccgaggagattacagcatatgttcagtacgggcgatgatatcgtcctgagcgtctggagagagcgcggtgaagaacgcggaatagcccgcgacacgcactaccagatcgcgatactgatcgggatgttttttcgcatccagcagcgtttcgcgggaaacgatgttgtactgaatatgccagcctttatgcacttcaaagaaggtacgcagcaggatcatcagtttctgcttgtcagattcgttctccagcgttgccggattcagtttctggttgagcaacacgccgccgagaatcgctgccgtaggcagtttacccacactgccaatgaccgcagtagggccaagatggtcagtaccggaggccgggcttgcgccttctgccagcggggtgtgggctttacgcccgtccggtgttgccatagtctgcgcgccaaacggtacgttagcggagatactactcgtacccgcgtaatagttgccgccaaccggaccacgaccgtagcgcggattatggtactgtttcagttcgtcgatataggtctgataagcgcgagccagcagcgtatcgacagtatcatcgtcgttgccgtacttcggcgcaccgttaatcagccgctgacgcagctgctcgtgagtcaggccgtcgaagtcatctgccagtgcggcagcaagctgttgctgaccaatcgcaccttgttcaaacaccagtttcttcactgccgccaggctgttgccgaggttggcaatgccgacctgcaggccagaaacccagtcatatttcgcgccgccttgcttgatacttttcgctcgctcaatacagtcatccaccagcgcgctgcagagaatatcgtgcacgttctcttccagcatggtgtcgacgacatattcgatttcgatacttttgcgggtgtagtaacggatttgcgtatcccacgcgtccatcacttcatcgaagttgttgaagttacctgcgctcaacgctttttcttgtggcaggaacactttgccgctggtggcatcatgcccgccttccagcgccgccagcatcacgcgggcgaagttgataaagctcatgccggtacagcgatagccccatttgccaccgacggcggtttctatacaaccaatcgctgcgtagtcataagcgtcctgcggttcaataccgagtttaataaattccgggatcacgatttcgtcgttgttgaacgccggcatcccgaagccgcaacggatcacctgtacgcaggcgtcgaggaaatcgttgctcattcctgcatggtaacgcacgctgaggttaggctgagtggaacgcaggcgaccgcaggattcgaggatcgcgtaagagagtggattcaccgcgtccattggttgaccatcaaccagattttgcccgccaatagtgacgttctgatacagcggacttcccgcagaggctttactgtgactgccggagcggatcttgttcacttccagcagtttcagccagcagctatgcagcatctcgatggcgtgttcgcgatccagcgtctggttgagttcaacgtcgcggcgatagtacgggtagagatactggtccatacgaccaaagcttacactgtgaccgttagattcgatctgcaaaatcaactggatgaagtaacacagttgcagcgcctgccagaaagtctgcggcggctggtgggcgataagatcgcagttttctgccatcgccagcagttcatcgcgacggctttcgcgggtttcggtcgcggccatttcacgcgccagggcagcgaaacgttcaatgtgttcactgactgccaccagcacgatatcaatcgctttcaggaattgctcaccgtgtaaatcttccagcaccgtcaggttgatgcggctgcgacgttccgctacttcctcgcgcagaccatcaagccctttttccagcagcagcgggaaattcaccgccaggtgcgcatcgccggaggtcatattgccttccgctttaatgattccggtcgccagcagacctttttgctcatcggtaaacatgccgtagcagcgatcctgtacggtctgaccgcgccaccacgggcacacttcatgcagaacgcgtttgttctcttcgctcaccgcaaagccagcaccgggacgatctgccagatcatcaatctctttttcgatccagctgacagtatattccgggaagatcggcgcggcgcgaacttcgcttgcctggttgccaatgatcaactcatcgtgtttgatccagatggtgcgattcgccaggtgatgcgccagtgccagcgcgcgacgtaccgggatcggcttatcgagatgttgttgatacatctcggtatagtgctgcgcgcgctcggtacagactggcggtttcacaatatgcaccagcgcatttttgtgcgctttaatgcggtcgctgagcgtgtccagtttcagtgtggtcatggttgttatcctcgtaaggtcgcggttaaccctttctggcaggcatactgctgggcaaagtcgagcagttctggcgcatcaagcggtttttccggggcgtcatagggcagattaagtaagtgatatttgttgatgcccagcgtgtggtagggcagaaaatgaatttcgccaacgtgcagctcgtcggcggcaaaatcggtaatggcttttacagaggtttcgtcggcattaaagccctgaatcagcggcacgcggataatgatttttttgcccgctgcggcgagttttttcaggttatccagcactctggcggcgttaccgtcggtccactgtttaaacggcgcgtcggcaacgtgttttaaatcggcaagaaacagatcgatatagggcagagaaggggcgatatatttccacggcacatgcagacaggtttctaccgcagtatgaatgcctgcctcgtggctggcttgcagtagcgccatcgccatttccggctgcataaagggctcaccaccgctaagcgttaaaccgccgccgctgcgatcgtaaaacggtttatcgcgcagaacggtcgtcatgatctcctcaacgcttttcacttcaccacacacggttaatgcctgtgtcggacagcagtcggttaacgccgtcagatgctccggggttaacttttcccgatgaataagcaaaccattcagcgcgcgctcaatcacttccggcgcggccttagcgcacagctcgcagccttccagacacagtcgtgcgtcatacagcagatcctgcgtgcgggcgcggctttccgggttctgacaccagcggcagcccaggctacagcctttaagaaatacgaccgtgcggataccggggccatcatgggtgctgtagcgctgaatattgaaaatcatagttgcctctctatttcgttcaagcattaaaatactttcgaatgaaagttagattgatgtgcgtcaactgttcagagagttttcccgtgatagtctacattcagacaaaaagtacattttgaggatggttatggaactgtatctggatactagtgacgttgttgcggtgaaggcgctgagtcgtatttttccgctggcgggtgtgaccactaacccaagcattatcgccgcgggtaaaaaaccgctggatgttgtgcttccgcaacttcatgaagcgatgggcggtcaggggcgtctgtttgcccaggtaatggctaccactgccgaagggatggttaatgacgcgcttaagctgcgttctattattgcggatatcgtggtgaaagttccggtgaccgccgaggggctggcagctattaagatgttaaaagcggaagggattccgacgctgggaaccgcggtatatggcgcagcacaagggctgctgagcgcgctggcaggtgcggaatatgttgcgccttacgttaatcgtattgatgctcagggcggtagcggcattcagactgtgaccgacttacaccagttattgaaaatgcatgcgccgcaggcgaaagtgctggcagcgagtttcaaaaccccgcgtcaggcgctggactgcttactggcaggatgtgaaagtattactctgccactggatgtggcacaacagatgattagctatccggcggttgatgccgctgtggcgaagtttgagcaggactggcagggagcgtttggcagaacgagcatttaaccggacgttctgcatcctcataaattgctgatgacgtggcggagtgccgcgtcttatcaggcctggaggtggcaattactgcccacacacctcacaccccggattacgcatcagtttcatttcgcgaaactgacaggtcatcgcatcgtacatgacgattttcccgctggccggtttgccataacctgccagcattttgatcgcttccattgcctgcaagctaccaattacgccgatcaacggtgccattacgcctgcttccacgcaggttaatgcattttcaccaaacaaacggctaaggcagcgatagcacggttcaccgtcctgataagtaaagacggtgatttgaccttccatacgaattgccgcgccggaaaccagcggtaccttcgcggcaaaacagcctgcgttcagttgattacgtaccgcaacgttatccgtacagtcgagcaccagatcgtgttcagcaatcaatgctgcaagttctgcgtcatccagcagtgcattgactggcgtaatcgcgatatgtgggttgatccgcgtcagggcgtcacgggcggattccaccttcggttgcccgaccgtggcatcactgtgcagtgtctggcgttgcagattgctgaggctaaccgtgtcgaagtcgagcagcgtcaggttaccgacaccggcgcttgccagatactggctggctgcacagccgaggccgcccaggcccactatcagcacgcgagaatctttcagcgcctcctggccgtcaaaatcaaagccgcgcagaatgatttgccggttgtagcgcagcatctcctgatcgctgagttccgccattacaggcctccgaacaacgcgttaaacggttctacttccacccattcgcccacttccacattgccgcgatcgcgttccagcacgataaagcagttgccgaggctaaaggagctaaatatatgactaccctgatgtccggtggtcgtcacttccagttcgccatcggcgttgcgttgcagcacgccgcgctggaaatcaagacgtcctggcgtttttttcaggcgggacgctgtgcgtacgcgctggcgcgcgggcaggccgctggcggtgttaccgcttagttttgccagcaaaggctgtaccagttgatagaaggtcagcgtcgcactaaccgggttgcccggcaggccgcagaaccagctattgctgagtttaccgaacgcgaacggtttacctggtttaatcgccagcttccagaaggcgatctcccccagctcttcaagaatcgttttggtgtaatccgcctcacccacactaacaccgccggaactgatcaccacatccgcctggctgtcggcttcaataaatgcggcgcgcagggcatggggatcgtcgcggataatccctaagttaattacctcgcatcccaactgttctaacatcaggtgtacggcgagacggttggtatcgtagatttggccgtcgcccagcggctgaccgggcaactggagttcatcaccggtagaaaaaagcgctacacgcactttacgaatcaccggaacttcggcaatccccagactagcaattactggcagctctgcggtagtcaggcgagttcccgccgggaaaacaaccgcacctgcagagatatcttcaccgcgacggcgaatattttgcccgctacgcacttcagcagtaaaacgcacgccattgtccatttgttcagtctgctcctgcatcaccaccgcttcgcagccttccggcaccggcgcaccggtcataatacgaatgcaggtacccgcaggccattcaccatggtatggctgaccggcaaaggatttaccggcaacgggcagcggttgcccggaggcaatatcggctaaacgcaccgcgtagccgtccattgcggagttatcaaaccccggaacatcaagcgggctaacgacatcgctcgccagaatacgaccaaaacactgtaccagtggcagcgtttcctgggcggtcagtggggtgacgcgagaaagcatctcattaagcgcggtgtcgaggctcatcaatccggtggtaaattccatgaaaacactcctgcggaggcaaaatcgaatttgcctattatgtcagaaaaacgccacagactgtatgccacctcgggcgtagcgctgggtcctgcctttacatgccatatccatctttctatattcaaaaattgaatgagtaattcataaaaattctgatatttatagcaaaagtggcgaaccacccttaatggacgaatactatgggcaaagcagtcattgcaattcatggtggcgcaggtgcaattagccgcgcgcagatgagtctgcaacaggaattacgctacatcgaggcgttgtctgccattgttgaaaccgggcagaaaatgctggaagcgggcgaaagtgcgctggatgtggtgacggaagcggtgcgtctgctggaagagtgtccactgtttaacgccggaattggcgctgtctttacgcgtgatgaaacccatgaactggacgcctgtgtgatggatggtaacaccctgaaagccggtgcggtggcgggcgttagtcatctgcgtaatccggttcttgccgcccggctggtgatggagcaaagcccgcatgtgatgatgattggcgaaggggcagaaaattttgcgtttgctcgtggcatggagcgcgtcagcccggagattttctccacgtctttgcgttatgaacaactactggcagcgcgcaaggaaggggcaaccgtcctcgaccatagcggtgcgccactggatgaaaaacagaaaatgggcaccgtgggggccgtggcgttggatttagacggcaatttggcggcagccacgtccacaggcggaatgaccaataaattacccggacgagttggcgatagtcccttagtgggtgccggatgctacgccaataacgccagtgtggcggtttcttgtaccggcacgggcgaagtcttcatccgcgcgctggcggcatatgacatcgccgcgttaatggattacggcggattaagtctcgcggaagcctgcgagcgggtagtaatggaaaaactccctgcgcttggcggtagcggtggcttaatcgctatcgaccatgaagggaatgtcgcgctaccgtttaacaccgaaggaatgtatcgcgcctggggctacgcaggcgatacgccaaccaccggtatctaccgtgaaaaaggggacaccgttgccacacagtgatgaacttgatgccggtaatgtgctggcggttgaaaatctgaatattgcctttatgcaggaccagcagaaaatagctgcggtccgcaatctctcttttagtctgcaacgcggtgagacgctggcaattgttggcgaatccggctccggtaagagtgtgactgcgttggcattgatgcgcctgttggaacaggcgggcggtttagtacagtgcgataaaatgctgttgcagcggcgcagtcgcgaagtgattgaacttagcgagcagaacgctgcacaaatgcgccatgttcgcggtgcggatatggcgatgatatttcaggagccgatgacaagcctgaacccggtatttactgtgggtgaacagattgccgaaagtattcgtctgcatcagaacgccagtcgtgaagaagcgatggtcgaggcgaagcggatgctggatcaggtacgcattcctgaggcacaaaccattcttagtcgttatccgcatcaactctctggcgggatgcgccagcgagtgatgattgcgatggcgctgagttgccgcccggcggtgctgattgccgatgagccaaccaccgcgctggatgtcactattcaggcgcagatcctgcaattaatcaaagtattgcaaaaagagatgagcatgggcgttatctttatcactcacgatatgggcgtggtggcagagattgccgatcgggtactggtgatgtatcagggcgaggcggtggaaacgggtaccgtcgaacagatttttcatgcaccgcaacatccttacacccgtgcgctgttagctgctgttccgcaacttggtgcgatgaaagggttagattatccccgacgtttcccgttgataagccttgaacatccagcgaaacaggccccccccatcgagcagaaaacggtggtggatggcgaacctgttttacgagtgcgtaatcttgtcacccgtttccctttgcgcagcggtttgttgaatcgcgtaacgcgggaagtgcatgccgttgagaaagtcagttttgatctctggcctggcgaaacgctaagcctggtgggcgagtctggcagcggtaaatccactaccgggcgggcgttgctgcgcctggtcgaaagccagggcggcgaaattatctttaacggtcagcgaatcgataccttgagtcccggcaaacttcaggcattacgccgggatattcagtttatttttcaggacccttacgctagcctggacccacgtcagaccatcggtgatagcattatcgaaccgctgcgtgtacacggtttattgccaggtaaagacgcggctgcacgcgttgcgtggttgctggagcgcgtgggcctgttacctgaacatgcctggcgttacccgcatgagttttccggcggtcagcgccagcgcatctgcattgctcgcgcgttggcattgaatccaaaagtgatcattgccgacgaagccgttagcgcgctggatgtttctattcgcgggcagattatcaacttgttgctcgatctccagcgtgatttcggcattgcgtatctgtttatctcccacgatatggcggtggtagagcggattagtcatcgtgtggcggtgatgtatctcgggcaaattgttgaaattggtccacggcgcgcggtcttcgaaaacccgcagcatccttatacgcgtaaattactggcggcagttccggtcgctgaaccgtcccgacaacgaccgcagcgtgtactgctgagcgacgatcttcccagcaatattcatctgcgtggcgaagaggtggcagccgtcagcttgcaatgcgtcgggccggggcattacgtcgcacaaccacaaagtgaatacgcattcatgcgtagataacattcaggcggagaataaaatggcaagagctgtacaccgtagtgggttagtggcgctgggcattgcgacagcgttgatggcatcttgtgcattcgctgccaaagatgtggtggtggcggtaggaagcaatttcaccacgctcgatccgtatgacgcaaatgacacgttatctcaggccgtagcgaaaagcttttaccaggggctgttcggtctggataaagagatgaaactgaaaaacgtgctggcggagagttataccgtttccgatgacggcattacttacaccgtgaaattgcgggaaggcattaaattccaggatggcaccgatttcaacgccgcggcggtgaaagcgaatctggaccgggccagcgatccggcgaatcatcttaaacgctataacctgtataagaatattgctaaaacggaagcgatcgatccgacaacggtaaagattaccctcaaacagccgttcagtgcgtttattaatattcttgcccatccggcgaccgcgatgattagtccggcagcgctggaaaaatatggcaaggagattggtttttatccggtgggaaccggaccgtatgaactggatacctggaatcagaccgattttgtgaaggtgaaaaaattcgcgggttactggcagccaggattgcccaaactggacagcataacctggcgtccggtggcggataacaacacccgcgcggcaatgctgcaaaccggtgaagcgcagtttgctttccccattccttacgagcaggccacactgctggagaaaaacaaaaatatcgagttgatggccagtccgagtattatgcagcgttatatcagtatgaacgtgacgcaaaagccgttcgataacccgaaggtccgtgaggcgctgaattacgccattaaccgtccggcgctggtgaaagttgcctttgcgggctatgcaacgccagctactggtgtggtaccgccaagtatcgcctacgcgcaaagttataaaccgtggccttacgatccagtgaaagcgcgcgaattactgaaagaggcgggatatcccaacggtttcagtaccacgctgtggagcagtcataaccacagcaccgcgcagaaagtgctgcaatttacccagcagcagttagcgcaggtcgggattaaagcccaggtgactgcgatggatgccggacagcgggcggcagaagttgaaggtaaagggcaaaaagagagcggcgtgcggatgttctacactggctggagcgctagtaccggcgaagcggactgggcactaagcccgctgtttgccagccagaactggccaccgacgctgtttaataccgcgttttacagcaataaacaggtggatgacttcctggctcaggcactgaaaactaatgatccggcggaaaagacccgcttatataaggcggcgcaggatatcatctggcaagaaagcccgtggatcccgctggtggtagaaaaactggtgagcgcacacagtaaaaacctgaccggtttttggatcatgccagacaccggcttcagctttgaagacgcggatttgcaataagcaacgcagggagtggaatgcttaattacgttatcaaacgcttactggggttgattccgacgctgtttatcgtcagcgtgctggtgtttttatttgtccatatgctgcccggcgatccggcgcgattgattgccgggcccgaagctgatgcgcaggttatagaactggtgcgtcagcagctggggttggatcagccgctgtatcaccagttctggcactatatcagcaatgctgtgcagggggattttggcctgagcatggtgagccgtcgtccggttgccgatgagattgccagccgctttatgccaacgctgtggctgaccataaccagtatggtctgggcggttatatttggtatggcggcgggaattatcgccgccgtctggcgtaaccgttggccggatcgattgagtatgaccattgcggtgagcgggatcagctttccggcatttgctctggggatgcttttaattcaggtattctccgttgaactgggctggctgcctaccgtgggagcagacagttggcagcactacattttaccctccctgacgctcggcgcggcagtggccgccgtgatggcgcgctttacccgcgcgagctttgtcgatgttttaagcgaagattatatgcgtaccgcgagggcgaaaggggtgagcgaaacctgggttgtcctcaaacacgggctacgtaacgcgatgatcccggtagtgaccatgatgggcttacagtttggctttttgctcggtggttccatcgttgtggagaaagttttcaactggccgggacttggacgcttactcgttgactccgtagaaatgcgtgattacccggtgattcaggcggaaattctgcttttcagcctggaatttattcttatcaacttagtggtggatgtgctttacgccgccattaacccggctatcaggtacaagtaaggatgcgactatttaactggcgacgtcaggcggtgttaaacgccatgccactggtcaaacctgaccaggtacgtacaccgtggcatgaattctggcgacgatttcgccgtcagcatatggcgatgaccgccgcattattcgttattttattgattgtggtggccatttttgcacgctggatcgctccctatgacgccgaaaattattttgattatgacaatctgaataacggaccttctttgcagcactggtttggcgtcgatagtctggggcgtgacattttcagccgtgtcctggttggtgcgcaaatcagcctggcggcgggcgtgtttgccgtgtttatcggtgcggcgatcgggacgttgctgggcttgctcgctggatattatgaaggctggtgggatcggctgatcatgcgcatttgcgatgtgctgtttgccttcccgggtattttactggcgatcgctgttgttgcggtgttgggaagcggcattgctaacgtgattattgcagtcgccattttttccatccccgcgtttgcccgcctggtgcgcggcaacacgctggtgttgaaacagcaaacctttattgagagtgcacgcagtattggtgccagcgatatgaccgttttgttgcgtcatatcctgcctgggaccgtctcttctatcgtggtgtttttcaccatgcgcattggtaccagcattatctctgccgccagcctcagttttctcggcctcggtgcgcagccgccgacaccagagtggggagcaatgctcaatgaggctcgagcggatatggttatcgcgccgcatgtcgctgtttttccggccctggctatttttctgaccgtactggcgttcaatttgttgggcgatggtttacgcgatgcgctggatccgaaaattaaaggataattacgtttgaatattgcttgaaagggtaatcacctcacaggaaattattgccctaagcaagtgttgtaactttctgctgattttgtagaatcgggtaatttggttaaaaagccgcagcaagggacaatttttgcagcggcacagcgttcagatagttattttgttaaatgtattaacatgctgagtttatacgaaaagataaagataaggctgataattttatttttattggcagcactgagttttattggtctttttttcatcattaactatcaactggtaagcgagcgcgcggtaaaacgtgccgatagccgctttgaacttattcagaaaaacgttggctatttctttaaagatattgaacgtagcgccctgacattaaaggacagtctgtatttattaaaaaatacagaggagattcaacgcgccgtgattcttaaaatggaaatgatgccatttttagacagcgtgggactggtacttgatgataataaatattatctttttagccggagggcgaatgataaaatcgttgtttatcatcaggaacaagtaaatggaccgcttgtcgacgagagtgggcgggttatttttgccgattttaacccaagcaaacgaccgtggagcgtggctagtgatgactctaacaacagctggaatccggcatacaattgctttgatcgtccgggtaaaaaatgtatctcttttacgctacacatcaacggcaaagatcacgatttgttagcggtggataaaattcatgtcgatttaaactggcgatatctgaacgagtatcttgatcaaatcagcgctaatgatgaagttctatttttgaaacaaggccatgagatcattgccaagaatcaactcgctcgtgaaaaactgattatttataatagcgaaggtaattataatattattgattctgtcgatactgaatatatcgaaaaaacaagtgcggtgccaaacaacgcattattcgaaatctatttttattatcctggcggtaatttattgaacgcaagtgataaacttttttatctgccgtttgcgttcattattatcgtattgctggtggtttatttaatgaccactcgtgtgttccgtcggcaattttctgaaatgacagagctggttaatacgctggcgtttttgcctgacagtacggatcaaatcgaggctctgaaaattcgtgaaggcgatgcgaaagagattatcagcatcaaaaatagcatcgcggaaatgaaagatgccgaaattgaacggagtaataaattgctcagtctgatctcttacgatcaggaaagtggttttattaaaaatatggcgattattgagtctaacaataatcagtatctggctgtggggatcatcaaactgtgtggtctggaagccgtggaagcggtgtttggtgttgatgagcgcaataaaatcgtcaggaaattgtgtcagcgaattgccgagaaatatgcgcaatgctgcgatatcgtgacattcaatgccgatctctatttacttctgtgtcgggaaaatgtacagacatttacccgtaaaatagcgatggtaaacgattttgacagcagctttggctaccgcaatctgcgcatccataagtctgccatttgtgaacctttgcagggggaaaacgcctggagttacgcagaaaaactgaaactggcgatttccagtatccgtgaccatatgttcagtgagtttattttctgtgatgacgcgaaactcaacgaaatagaagagaatatctggattgcgcgtaatattcgccatgcaatggaaattggcgaactattcctcgtctatcaaccgatcgttgatattaacacccgcgccattctgggcgcggaggcgttgtgccgttgggtgtctgcggagcgggggatcattagtccgctgaagttcattaccattgctgaagatatcgggtttatcaatgagctgggttatcagattattaaaacggcaatgggtgaattcagacattttagtcagcgtgcgagcctgaaggatgatttcttactgcatattaatgttagcccctggcagttaaacgaaccacactttcatgagcgttttaccaccatcatgaaagaaaatggcctgaaggcgaacagcctctgtgttgagatcactgaaaccgtgatcgagcgaattaatgaacatttttatctcaatattgaacaactgcgtaaacaaggggtacggataagcattgatgactttggcaccggtttgagtaacctgaaacgtttttatgaaattaatccagacagcataaaggtggacagccaattcaccggcgatattttcggtactgcgggaaaaattgtgcgcattattttcgacctggcacgctataaccggatcccggtgattgcggaaggcgtagagagcgaagacgttgcgcgcgaattaatcaaattaggatgtgttcaggctcaggggtatctgtaccagaaacccatgccattctccgcctgggataaaagtggaaaattagtaaaagagtaatttacgtatgtccagaatcaataagttcgtacttacagtcagtctgctgatttttatcatgattagtgcagttgcctgcgggatctacactcaaatggtaaaggaacgggtgtatagcctgaaacagtccgttattgatactgcttttgcggtggcaaatattgctgaatatcggcgtagcgtggcaattgatcttatcaacacgctaaatcccacggaggaacagctgttggttggtttgcgcacagcttacgccgacagcgtttccccctcttatttgtacgatgtcggtccttatctgatttccagtgacgaatgtattcaggtaaaggagttcgagaaaaattattgtgcagatattatgcaggttgtgaagtatcgacatgtcaaaaatacagggtttatctcttttgacggtaaaaccttcgtctattacctctatccggtaactcacaatcgtagtctgatatttttgcttggtctggagcgtttttctttactgagtaaaagcctggcgatggacagcgagaacctgatgttctctctatttaagaacggtaaaccggtgaccggtgatgaatataatgctaaaaacgccatcttcaccgttagcgaagcgatggagcacttcgcctatttgccgaccggattgtatgtatttgcgtataaaaaagatgtttatttgcgggtttgtacattgattattttctttgccgcattggtggcagtgataagcggtgccagttgcctctatctggtacgcagagtgattaatcgtggtattgtggagaaagaagccatcattaataaccattttgaacgcgtactggatggcgggcttttctttagcgctgccgatgtcaaaaaactctacagtatgtataacagcgcgttcctggacgacctgaccaaagcaatgggcagaaaatcctttgacgaagatttaaaagcgctgccggaaaaaggcggttatttgtgcctgtttgacgtcgataaattcaaaaacattaacgacaccttcggtcatttgctgggcgatgaagtgttgatgaaagtggtgaaaatccttaaaagtcagatcccggtagataaaggtaaagtctaccgcttcggcggtgacgaatttgcggtgatttatacgggtggaacgctggaagagttgctaagcattctaaaagaaatcgttcatttccaggtgggaagcattaatttaagtaccagtatcggtgtagcacatagtaatgaatgtcctaccgtcgaacgcttgaaaatgctggcggatgagcggctgtataagagtaagaaaaacggcagggcacagattagctggcagtaatcattattcgcaggccggacaaatgattttgcccggcctgaattaattaaacccggctaccccacaaatcgtactcatcggcgtgctcgactttcacacgcaggatatcacccggcttaacgttggtttcaccattgagataaaccgcgccgtcgatttccggtgcatctgccatgctgcgaccaatcgcgccttcttcgtccacttcgtcgataatcaccagaatttcacggcccactttctcttgcaggcgctcggcggaaatctgctgctgcagctgcatgaaacggttccagcgttcttctttaacttcttccggaacctggtcaggcagggcattggcgtctgcaccttcaaccgggctgtatttaaagcagccaacgcgatccagacgcgcttctttcaggaagtcgagtagcatctggaaatcttcttctgtctcgccagggaagccgacaataaaggtactgcgtagggtcagttccgggcagatttcgcgccactgtttgatgcgcgccagttggcgatctacagaacccggacgcttcatcagtttgagaatgcgcgggctggcgtgctgcaacggaatgtccagatacggcaggattttgccttctgccatcagtgggatgacgtcgtccacatgcggataagggtaaacgtagtgcagacgtgtccagatccccagtttgcttaactgttcgcacaggctgaccatgctggtttttaccggctcgccgttgtggaagccagtacgatgtttaacatcaacgccataggcggaagtatcctggctgatcaccagaatctctttaacgcccgcatctaccagacgtttcgcttcacttaacacttcgccaatcggacggctcaccaggtcgccgcgcatagacggaataatgcagaaggtgcagcggtgattacagccttcagaaattttcagataggcataatgacgcggcgtcagtttcacaccttgttctggcaccaggctcaggaatgggttgtgtttcggttttggcacgtagtgatgaacgtgctccagaacctgctcatagctatgaggcccggtgatttccagcactttcgggtggacttcgcggatctgatcttcttttgcccccagacaaccggtcacaataaccttgccgttttcattcaacgcttcaccaatggcttccagactttcttgtaccgcgctgtcaataaagccgcaggtgttgacgatcaccatgtccgcatcgtcatagctcggtaccacgtcataaccttcagtgcggagttcggtgagaatacgctcactatcaacaaggtttttcggacagccaagggaaacaaagccgattttcggctggggagttactttgctcatagcttaaaaaatattcagttacaggaaaggtcagggcagggattctacagagttctggataaaatttgtatcgcaatctcattcgctggcggaggcgaaggaaatgtaaattttgttaattcggcgtgaagaattgatcctggacagcattttgctcaaaaaatagccatactatttaattgcaacaaggctgggaagaggaggatcgaagtatgttcgttgacagacagcgaatcgatctgctgaaccggttgatcgacgcacgcgttgacctcgccgcatacgtgcaactgaggaaggcaaaaggatacatgtccgtcagcgaaagcaatcatctacgagataacttttttaaactgaatcgcgaactgcacgataaaagcctgcggttgaatcttcatctggatcaggaagagtggagtgctcttcatcatgctgaagaagcattagcgacagccgcagtatgtttgatgagtgggcaccatgattgcccgactgttattaccgtcaacgccgataagcttgaaaattgtctgatgagcttaacgctgagtatccagagcctgcagaagcacgccatgcttgagaaggcctgaaaactaagggggagaaagcgtctcccccttcatgtttaagtttttgtaaaaatgaatttgttatctcctccactgactacgctttaagccagagtcaatccggaggcgttatgcatcgacaatcctttttccttgtgccccttatttgtctttcttccgctctctgggcggctcctgcaacggtaaatgtcgaagtactgcaagacaaactcgaccatccctgggcactggcctttttacccgataatcacggtatgttaatcactctgcgcggcggcgagttgcgtcactggcaagcaggaaaaggattatctgcgccgctttccggagttccggacgtttgggcgcacgggcagggcggcctgctggacgtggttttagcgcctgattttgctcagtctcgccgcatctggttaagttattccgaagttggcgatgatggcaaagccggaactgctgtgggttatggccgcttaagtgatgatctcagtaaagtgaccgacttccgcaccgtctttcgccagatgccaaaactgtctaccggcaaccattttggcgggcggctggtattcgacggtaaaggttatctttttattgctctgggcgaaaacaatcagcgcccgacggcgcaggatctggataaattacagggcaaactggtgcgtctgaccgaccagggcgaaatcccggatgataatccttttataaaggaatccggtgcgcgcgccgagatctggtcttatggcattcgtaatccgcaaggaatggcgatgaatccgtggagtaatgcactgtggctgaatgaacatggcccgcgcggtggtgatgaaattaatatcccgcaaaaaggcaaaaactacggctggccgctggcaacctggggaatcaactatagtggctttaagataccggaagcgaaaggggagatcgtcgccgggaccgagcaacctgttttttactggaaagatagccccgctgtgagcggcatggccttctataacagcgataaattcccccagtggcagcaaaaattatttattggcgcgctgaaagataaagatgtcattgtgatgagcgtcaacggcgacaaagtgacagaagatggccgtattttaacggacagagggcagcgaattcgtgatgttcgcactggacccgacggttatttatacgttctcaccgacgagtccagtggggaattacttaaagttagcccacgcaattaactaacgggaatcatcaccactttgcgcactgcggggcgttcagtgagttgctgataccagcgttgcagatttggacgcggtgtccaggtcaggccaacgttaaacaaattgtagatgaacggtgcgatagcgatatcgcccacaccaaactcgtcgccagagaaccattttacttttgccagttccgcatcgagcagggcaaacagggcgtcgcactctttgcaactggcatcaatggcggcctgatcgcgctcttccggtggtgttctgactaatcccatcaggatcccgcgatgagcattactgagcgtctggtttgcccagtccatccatttttccgcttccgcacgacgtgccggactgtcgatccacaggcgtttttgcccgtactgtgccgccagatagcggacaatggcgttactttcccaaagaatgagatcactttcgtcgtcacgcaacaacggcaccagcccgttagggttcatcgccagaaaatcagcatcgtgatttatcccaaactcacggcccgcgagaatttgctcataaggtagttccagttcttcgagcgtcagcaatactttttttacgttagtactattattccgaccccacagcgtaatcatactcaccccttttccgacaggcagccacaggctgaacaggactccgatggtgaagtaaagttaacttttaagcaacagctggcaaaaaaatgacaccagaagcagcgaagcggcaggatattgcataaactttaaaaactttaccaacttacggtttctttaagtttgtgtgtgcgttattaatcaccaaacttatcatacggcgatataacgtattttttttgaatggatactcgggtggcatttatgacgcaatactcctctctccttcgtggtcttgcagcgggttctgcatttttattcctttttgccccaacggcattcgcggcggaacaaaccgttgaagcgccgagcgtggatgcgcgtgcatggattttaatggattacgccagcggtaaagtgctggcagaaggcaatgcggatgagaaactggatcccgcgagcctgactaaaatcatgaccagctatgtggttgggcaggcgcttaaggccgataagattaaactcaccgatatggtgacggtcggtaaagatgcctgggcgacgggaaatccggcactgcgtggtagtagcgtaatgttcctcaaaccgggcgatcaggttagcgtggcagacttgaacaaaggtgtgattatccagtccggtaatgacgcctgtattgcgctggctgattacgttgccgggagccaggagagttttattggtctgatgaatggttatgccaaaaaactgggtctgaccaacactaccttccagacggtgcacggcctggatgcgccggggcagttcagcaccgcgcgcgatatggcattgctgggtaaagcattgatccacgatgtgccggaagagtacgccattcataaagagaaagagttcaccttcaacaaaattcgtcagcctaaccgtaaccgtctgctgtggagcagcaatctgaatgttgatggcatgaagacaggaaccacggcaggcgcgggatataatctggttgctagcgctacccagggcgatatgcgtttaatctccgtagtgttgggggcgaaaaccgaccgtatccgttttaatgagtctgagaaattattgacctggggtttccgcttctttgaaaccgtgacgccaattaaacctgatgccacctttgtgactcagcgcgtctggtttggtgataagagcgaagtgaatctcggggcaggtgaagcgggcagtgtgaccataccgcgtgggcagctgaaaaacctgaaagcgagttatacgttaacggaaccgcagcttaccgcaccgctgaaaaaaggtcaggttgtcgggaccattgatttccagcttaacggtaaatccattgagcagcgtccgctgatcgtgatggaaaatgtggaagagggcggattctttggtcgggtgtgggatttcgtgatgatgaaattccatcagtggttcggcagctggttctcttaatcttctgataaccggatggcgcgaaacgtcatccggttatacgtcattaatacatcaacttaatgcgctgcgtctgcgcgtacttcacatactcatcttccgggcaacaatcgctcaccacaatatcaaagcgtttcaggtcacccatgcgcgccggacgcaccttgccaaatttactgtggtcgacaaccagcacatgcttttgcgccatgctcatggcccagtgttttaccggcaactcttcaagattaaaacaggtagcgcctttactgacatgcacgcccgccgcagaataaaaagcgatatccgggcaaaaattattcagcgtttgctgaaaatcgatgggtttgaaaatggcgttgctggcgtgaaattcaccaccgcaaagaaacgcgcggcaatggggtttctctttcagcgccagaaaggtatttaggctataacaaacggcggtaaaagggatttcattatcaatcgcttcaataatccacggcgtggtggtgccacagtcaaaaaagagggtctgatcgggttctaccagcgtcgcagccagttttgccgcccggcgtttttcttccaccaggcgggatttttgatcgcttaacaggtaatggctggcactgcgcggttccagaacaatatagccgccgagcaaaacgacgggcgcactgtggttgttcagatcgcgacgaatcgtcatctcgctaaccccaagcagggcggcggcgtctttaagatgtaacttatcgctgcgttttaattcttgcagcagctgcccgatacgctcttcgcgacgtgtttccataatccctctgaatagttattgaagcgagccgctcaatactacactttttagcagagatcagtcacgcacccagcctttgcggatcggtaatgcaaaacagacgcgataccagctttgcagacgttgatagagtttatgccccatcgcttgccagataatctgggcactaaggcagccaatcatacctgccagcaatccaccgagcatatccagcggccagtggacgccaagataaacgcggctccaggcaatgacgacggccagcaccattaaaagactgccggaccacaggcgatgccagcataaaaatgccagtgcaaaggtgaaaatcaccgtaccgtgatcgcttgggaaactgtcatccgccgcatgatgcaggaagttatagccgatattttcgacaaagggtcggtcgtgcggaaaaagatgtcccatcgtccaggacacaaacaggctgaccgccagcgcgatagcgatttttatcaccagttgccgttgtgctgtaagcccccacaaccaaagtaccacggccagcaacggcaccacggtaatcaaatctttagcaataaaaatcgccaagctgatcatccacggagcgctgtctggcgtcgcgttaataagagagaatagagagagattcaaattttccagcataacttcccgacgcaaagtgattaaaagggagccaatacaggcaagtcgttgagaataaagtgcaggttaaactgggtaaagcggcatcgtcttatttccctcaagcggcctgtttacggtgggtgattgtaacgggcataggttaaataaaacttaaagaaagcgtagctatactcgtaataatgtaagaatgtgcttaaccgtggtttcagctacaaaattcgctttctcgttagctgcgcttttattaaactctgcgcgattattattggcgaagaaattgcatgcaaaataaattagcttccggtgccaggcttggacgtcaggcgttacttttccctctctgtctggtgctttacgaatttagtacctatatcggcaacgatatgattcaacccggtatgttggccgtggtggaacaatatcaggcgggcattgattgggttcctactagcatgaccgcgtatctggcgggcgggatgtttttacaatggctgctggggccgctgagcgatcgtattggtcgccgtccggtgatgctggcgggagtggtgtggtttatcgtcacctgtctggcaatattgctggcgcaaaacattgaacaattcaccctgttgcgcttcttgcagggcataagcctctgtttcattggcgctgtgggatacgccgcaattcaggaatccttcgaagaggcggtttgtatcaagatcaccgcgctgatggcgaacgtggcgctgattgctccgctacttggtccgctggtgggcgcggcgtggatccatgtgctgccctgggaggggatgtttgttttgtttgccgcattggcagcgatctcctttttcggtctgcaacgagccatgcctgaaaccgccacgcgtataggcgagaaactgagtctgaaagaactcggtcgtgactataagctggtgctgaagaacggccgctttgtggcgggggcgctggcgctgggattcgttagtctgccgttgctggcgtggatcgcccagagcccgattatcatcattaccggcgagcagttgagcagctatgaatatggcttgctgcaagtgcctattttcggggcgttaattgcgggtaacttgctgttagcgcgtctgaccagccgccgcaccgtacgtagcctgattattatgggcggctggccgattatgattggtctattggtcgctgctgcggcaacggttatcagtagccacgcgtatttatggatgactgccgggttaagtatttatgctttcggtattggtctggcgaatgcgggactggtgcgattaaccctgtttgccagcgatatgagtaaaggtacggtttctgccgcgatgggaatgctgcaaatgctgatctttaccgttggtattgaaatcagcaaacatgcctggctgaacgggggcaacggactgtttaatctcttcaaccttgtcaacggaattttgtggctgagcctgatggttatctttttaaaagataaacagatgggaaattctcacgaagggtaaaaaaatgcctgactgctttgtgcgatcaggcattctcgaattaatggtgatggtcgtcaatctggtgttcgataaccatcccttcacctacgctggcaagatggcgaacataaggatgcgggcggtaagccggagctggcgcaggagccacatagacggtttgcggcacagtcgcgacgctgaccgcttgtggaacgctgacactatcaggaaccacaaccactttgtatccactcggcacatcgacggtgacactttgcgccatcgccacaccagtaaagcccattaaaagcgcgcccaacagtagacaatttttcataatcatttcgcctgaaataatgcagcgggttaatttccgcgaattatgcagccttcattcaggcattgtgttgccgggcgtgctgccggttttattggtcaaatggcgcttcgtgtttaagaactttatcgatcacatccagtacgccttcacggttattggagcctgcgcggtattttgccgctgcgacgaccgcgctaccggcattttccattgcaaaactaaagcctgcctgacgcagcatctcaatatcgttaccgccatcgccaaagaccaccacttcgctgtcgtctattccccataatttctgcagttggcgaaggccattggctttatgtacgccggggataatcagatcgatgctgccgttgccggtgtggacgctcaccataatatcgccgatggcctcatgtaatgctttttgtacttgtggaatcagttcatcggaaagattcaggccaaacttaaagaagatatcctctaagttgtcaaagttatcgacgtattccagacggtgataatacatttccgccaccgttttcatggcatcgtcatattttttgagtgtataggcactattttttccgcaggcaataatttccacttccgggcgcgtcagcaaatgttccacgacagtagcaaacgcatccttgcttagctcgccattaaaaacatctttgccttcgctcactacccagccgccgttttcagccacaaaggcaatttcattagcaatttcagggaagaaagagatcaactgataatattgattcccgctggcgactacaaagcgaattccttgtgctttcatttgctgatactgagccataaaccgctcacggttataggttttttgatcgcttaagaaagtaccatccatgtctaccgcaattaatttaatgctcatcaactattctccatcgccgtctgcgttttggtatcgggtttggcgacggctttcgcgacaatagccgcgagaataaccagcgccagtacaaccagcattgcactacgtaatccataatgttcgccgagatagcccagcagcggcggcccgacgaggaaagccagataaccggtcgttgctaccacactgacgcgggttggtgcatcggggccggtatcgctggcggcagaaatggtcagcgggaagcccaggctggcacccagtccccagagtacaacagacaccccagcgacccaggcgctatcgacaaaaataatcagcccaatacccaacgcccccattagtgcactggcccgaaccacggcaacgcgactgtaacggtcgatgaaccaaccgccggtgaagcgtccaacggtcatccccagggtaaaaccggcataaatcaggctgccggaagtagggctaaaaccgtgaccgtcaaccattaataagggtaaccagtcgttggcagaaccttcggcaaaggccatcgccagcaccacaacacctatcagcagcaactggatatcgcgataaaaaggtacgcctttttcgccatgctgggtgccatcggcagcatttttgcccgtaccgtcagggattgcctgaatggcgatataaataggtgcgatacctaccagcgccgccaataaaatgtgcaccgttgccggaacgccaaaggccgtcagtgccatcccgacacctgcgcctgccagcgtgcccaggctataaaaaccgtgcatcatcggcaaaaccgtcttattcatttctcgctcaacggcagcaccttcaacgtttatcgccacttccgcagaaccaaaacttgccccaaagacgccgagaccaacggcaaagagcagggggcttgtcagccagagtgccagacttaatatcatcatcccgatcaatgcgcaggacatcgtgaccaggatgacattacgtgtcccaaagcgtttcactaaccacgcgctgcagagaataccgctcatgctaccgatgctcagaccaaagagaacaccgcccatttcagcgatgctgacagagagaatatcgcggatagcaggcgtacgggttgcccaggacgccattaacaggcctggcaaaaagaagaacataaacagcgcccaggttcggcgtttcaatgcattacgactagaatttacggtcatagatcacgtcaaaataagaagagggaagacaacattagcaaggttgtgtacatttgtacacaattgcagagagaggaaatgacatgcgtcgcgctaacgatccgcaacggcgagaaaaaattatccaggccacgctggaggcggtgaaactttacggaatacatgctgttacgcaccgcaaaattgctacccttgccggggtaccgttgggaagcatgacctactattttagtggaattgatgagttgttactggaggcgttcagcagttttactgagatcatgtcccggcaatatcaggcattttttagcgatgttagtgatgctccgggcgcatgccaggctatcaccgatatgatctacagcagtcaggttgcaacgccggataacatggagctgatgtaccagctctacgcgctggctagccgaaaaccgctattaaaaacggtaatgcaaaactggatgcagcgcagtcagcaaacgctcgaacaatggtttgaacccggaaccgcccgcgcgcttgatgcgtttattgaggggatgacgctgcattttgtcaccgaccgtaagccgctaagccgcgaggagattttgaggatggttgagagggttgcagggtaatagataagttttagataacaaaaaacccatcaaccttgaaccgaaatggcggggttgatgggctccacaaaatggggacatcaaagaaaagcagtggcactaattaagactgatgccctgcggaaaagttctgcggttgtgcaaaaaaatttcattttcagggcaacttcagttttatcctaatcctggccataccatgacgatgattgtccctgccagcgtcagcaggacgttggcgattgcataggtgcccgcatagcccagcgccgggatgttactgcgagctgtatcactgatgatctccattgccggcgcgcaggtacgtgcgcccatcattgcgccgaacaacagcgcgcggttcattcgcaatacataagcaccgaacaagaaacagataaccacgggcaccagactgacaatcaatccggcaatcaacatctgaccgccaatcgcgcccaggccgttattaataccgctaccggcgctcagaccaacgcctgccataaacaccatcaagccgaactctttcaccatgcttaatgcaccctgcggaatgtaaccgaaggtcgggtggttagcacgcataaagcccagcataattccggcgaataacaacccggcagcgttccccatgccgaaactgaatgtgctgaactggaaggtgatcatcccgatcatcagcccaataacaaagaaggcgcagaatgccagcaggtcagtgacctggctgtgaatgctgataaagccgatgcgatcggcgatggtttttacgcggcgggcatcgccgctgacttgtaaaacgtcacctttgttaagcacgacgttgtcatctatcggcatctcaatctggctacgaatgacgcggttaaggaagcaaccgtgatcggtcaacttcagttgtgcgagacgtttacctacagcgttatggtttttaacgaccacttcttcagtgacgatacgcatgtcgagaaggtcacgatcgaaaacttctttaccgttacggaagctgggatcgagtcgggcatgggcgtcgggatagcctaccaacgctatttcatcgcccatttgtagcacggcatcaccgtctggatttgccagaatcccgttacgtcgaatacgttcaatgtagcagccggtttgtcgataaatacccagttcacgcagatttttgccgtcggtccaggccaccagttccgggccgacgcgataggcgcggatcaccggtaaataaaccttacggttggcatcagtgtccaggccacgttcgcgggcgatttgctgggcgctggtctgtaagtcctgatgctgcaatttcggcaagtaacgcgcaccaacaatcaaactcaccagaccgattaaataggttaaggcatacccgaggctcagattatccagtgccagactgagctgcctgctttccatgccggaatgacgcagtgtatcgccagcaccgaccagaaccggtgtgctcgtcatagagcctgctaacataccggccgtcaggccaatatcccagccaaacagcttacctaaccctaaggcgatcaccagcgcactgccaaccatcaccagtgctaacattaggtaatttttcccatcgcgaaaaaaaatggaaaaaaagttcggtccggcttcgaccccgacgcagaaaataaacagcataaagccaagattaagcgcatcggtgttaatgctgaaatgttgttggcctaataacaggcttacgactaaaacgccaatggaattacccagttggatgctaccaagtcgtaactttccgagacatagcccaagcgcgaggaccacaaataataacagaatgtaattcccatttaacaattcggcgacgtttatattcacggaggctaacttcttgtttactagtaagctgttgaaagaaatggtaatttacgataatgttttttaccagaattcagggcgcagattcattcagcgcacctaaacgatagtaaagtaacaatatattttactagtgtaatcacattaggtatcaacggctatatgaattgcgttggcctatattagcatggaatgcgaagcggctttatcttactgaacgccacactggcgaaaaatgtgttcgatagacgcagtgtcaggaggaacgagtgaaacataaacaacgttgggcgggggcaatctgctgttttgtcctcttcattgtggtgtgcctttttctggcgacgcacatgaaaggcgcttttcgggctgccgggcatcctgaaatcggcttgctatttttcattcttcctggagcagtcgccagcttctttagtcagcgtagagaagtcctgaaacctctgtttggcgcaatgctggcggcaccctgtagcatgctcattatgcggctgttttttagtccgacgcgcagtttctggcaagagctggcatggttactaagcgcggtgttctggtgtgcgctgggggcactgtgtttcttatttatcagtagtttgtttaaaccacagcacagaaaaaatcagtaaagccctcaacgcgagggcttgtcagacgatcaggcgtccagattttctttcacccatgcagcaaaatcggtatagccgccgatatgttgctgatcgacaaaaatctgcggcacggtttctacgggtttacctgccttttgttgtagatcttctttagtgatcccttccgcacgaatatctacatactgatactgaaaatcatcgcgttcattgctcaatttctcagccagatcttttgcacgcacacagtaagggcaaccgctacgaccaaaaataacggtttgcattatttctctcctcatagatttatgcctgtaatgatcacgctaaaatgtattcgctgaaagtaggtttaacctgttgcattaattgctaaaagctataactgttaaacacaatacagtgaaaagttttagactgaaggctcactttgcagagggaagcgtatgcgcgcgatcggtaaattgcctaaaggcgtgttgatactggaatttatcggaatgatgctactggcggtggcgctgctgagcgtaagcgactccctgagcctgcctgagccattttctcggccagaagtgcagattctgatgatttttctcggtgttttgctcatgcttcccgctgcggtggtggttattcttcaggtggcaaaacgtcttgccccacagctgatgaaccgtccaccgcaatatagtcgtagtgaaagagaaaaagataatgacgccaaccattgaacttatttgtggccatcgctccattcgccatttcactgatgaacccatttccgaagcgcagcgtgaggcgattattaacagcgcccgtgcgacgtccagttccagttttttgcagtgcagtagcattattcgcattaccgacaaagcgttacgtgaagaactggtgacgctgaccggcgggcaaaaacacgtagcgcaagcggcggagttctgggtgttctgtgccgactttaaccgccatttacagatctgtccggatgctcagctcggcctggcggaacaactgttgctcggtgtcgttgatacggcaatgatggcgcagaatgcattaatcgcagcggaaagcctgggattgggcggggtatatatcggcggcctgcgcaataatattgaagcggtgacgaaactgcttaaattaccgcagcatgttctgccgctgtttgggctgtgccttggctggcctgcggataatccggatcttaagccgcgtttaccggcctccattttggtgcatgaaaacagctatcaaccgctggataaaggcgcactggcgcagtatgacgagcaactggcggaatattacctcacccgtggcagcaataatcgccgggatacctggagcgatcatatccgccgaacaatcattaaagaaagccgcccatttattctggattatttgcacaaacagggttgggcgacgcgctaaaaccgccacgtcgatgtatgatacgcgggcttttgaccaggtctgacagagaggtgcagggtgaaaattgccatattgtcccgggatggaacgctctatagctgtaagcggctgcgtgaagccgctatacagcgcggtcacctggttgaaattcttgatccgctttcttgctacatgaacataaatcctgcggcgtcttctattcactacaaaggccgcaagttaccccattttgacgcagtgatcccgcgtattggcaccgccattaccttttatgggacggcggcactgcgccagttcgagatgctggggagctatccgctcaatgagagcgtcgccattgcccgggcgcgtgacaaattgcgttccatgcaactgctggcgcgtcagggcatcgacctgcctgtcacgggcattgcgcatagcccggatgataccagcgatttaatcgacatggtcggtggtgcgccgctggtggtcaagttggttgaaggcacgcagggaattggcgtcgtgctggcggagacgcgtcaggcggcggaaagcgtgattgacgctttccgcggtctgaacgcgcatattctggtgcaggaatatatcaaagaggcgcaagggtgcgatatccgctgtctggttgttggcgatgaagtggtcgctgcgattgaacggcgggcgaaagagggcgattttcgttccaatttgcatcgtggcggcgcggcaagcgtcgccagtatcacaccacaggagcgtgaaatcgcgataaaagccgcgcgaacgatggcgctggacgttgctggtgtggatattctgcgtgctaatcgcgggccgttggtgatggaggtgaatgcgagcccggggctggaaggaatagaaaaaaccaccggtatcgacatcgcgggtaaaatgatccgctggatcgaacgccacgctacgacagaatattgcctgaaaacgggtggttaatcgcaatcacattactgatcatggttttgcctgcgctttttgcgtaagctgtgccggtctttttatcgaaagaggttgtacaaaattatgacaagcctggtcgttcctggtctggatacgctgcgtcaatggctcgatgacctggggatgagtttttttgaatgtgataactgtcaggctctgcatctgccccatatgcagaatttcgacggtgtctttgatgccaaaatcgatctgatcgataacacgatcctgttttctgccatggcggaagtccgacctagtgccgtattgccgctggcggcggatttatctgccatcaatgccagtagcctgaccgtgaaagcatttcttgatatgcaggatgataatctgccaaagctggtggtttgccagtctttatccgttatgcagggcgtaacctatgagcagtttgcatggttcgtgcgtcagagcgaagagcagattagcatggtcattcttgaagctaatgcccatcaactgctgttaccgactgatgatgaagggcaaaacaacgttaccgaaaactatttcctccactgataactcctttcgagcacgcagtcgctggtgcagtggctgcgcgctgcaaaattatctgctgtttttaaccttttcttaaagattatttcacttctcttgtgtcgatttggctttatcacatagagcaaatatgcataaaaatttgttaaataccgttttttaatccgagctatagtctcaaaccctggctaaagttattcttgcgatgcttttatatagcgagcagtgctggccgggagaaagttctcttttcttacaccgcgccgataaaaaatatgcacgtttattgcatatctttcagtgtgacaacttttgttcgtttgttaacgaactttcagaaggaaagagatatgaccgccttaaataaaaaatggctaagcggtctggttgcgggtgctctgatggccgtctctgtcggcacgctcgcggctgaacaaaaaacactccacatttataactggtctgattatatcgccccggacacggtggccaattttgaaaaagaaaccggtattaaagtcgtctacgatgttttcgactctaacgaagtactggaaggcaaattaatggccgggagtaccggctttgatctggtggttccatctgccagctttctggagcgccagttgactgcgggagttttccagccgctggacaaaagcaaattgccggagtggaagaatctcgacccggaactgctgaagctggtcgccaaacacgatcccgacaataaatttgctatgccctatatgtgggcgacgaccgggattggctataacgttgataaagttaaagcggtgctgggcgaaaacgcgcccgtcgatagctgggacttgatcctcaaacctgaaaatctggaaaaactgaaaagctgcggtgtctctttcctggatgcgccagaagaagtttttgctaccgtgttgaattatctcggcaaagatcccaacagcactaaagcggatgattacaccggaccggcaacagatctgctgttaaagctgcgcccgaacattcgttatttccatagttctcaatacattaacgacctggcaaacggcgatatttgcgtcgctatcggctgggcaggtgatgtctggcaggcgagtaaccgcgcgaaggaagcgaagaatggcgtgaatgtcagcttcagcattccaaaagaaggggcgatggcgttctttgatgtattcgccatgcctgcggatgccaaaaacaaagacgaagcctatcagttcctgaattacctgctgcgcccggatgtagtagcgcatatttccgaccatgtgttctatgccaacgccaataaagcagccacgccgctggtgagtgcggaagtccgtgagaacccaggtatttatccgcctgcggatgttcgtgcgaagctgttcactctgaaagtgcaggatccgaaaatcgaccgtgtgcgcacccgcgcgtggaccaaagtgaagagcggaaaataatccgcagtcgtagatgccggaggggcgcaccacacccgccggcaattcgcaccattatggtgcgcttgcacacattcaatgccggagagcagccgtgaatgacgctatccctcgcccgcaggcgaaaacccgtaaggcgctgacgccgctattagaaatccgcaacctgaccaaatcctacgatggtcaacatgcggtggatgatgtcagcctgaccatctacaaaggtgaaatcttcgcgctgctgggcgcatccggctgtggcaagtccacgctgctgcgtatgctggcaggtttcgaacaaccttctgccggacagataatgcttgatggcgtcgatttgagtcaggttccgccttacctgcgccccatcaatatgatgtttcagtcttacgcgctgtttccgcatatgaccgtggaacagaacatcgcttttggcctgaaacaggacaaactaccgaaagcggaaattgccagccgggtcaatgagatgctcggcctggtgcatatgcaggagttcgccaaacgcaaaccgcatcagctttccggtggtcagcgacaacgtgtggccctggcccgaagccttgcgaagcgcccgaaactattactgctcgatgagccgatgggcgcgctggataaaaagctgcgtgacaggatgcagcttgaagtggtggatattctggagcgcgtcggtgtgacttgtgtgatggtcacccacgatcaggaagaggcgatgaccatggcggggcgcatcgccattatgaatcgtgggaaatttgtccagattggcgaaccggaagagatctacgagcatccgactacccgctatagcgccgaatttattggcagcgtaaacgtctttgaaggcgtactcaaagagcgtcaggaagatggcctggtgcttgatagcccggggctggtgcatccactgaaagtcgacgcggatgccagcgtggtcgataacgtgccggtacatgtggcgctgcgcccggaaaaaatcatgctttgcgaagagccgcccgccaatggttgtaacttcgcggtgggggaggtgatacacattgcctatctcggcgatcttagcgtgtatcacgttcgtctgaaaagtgggcagatgattagcgcccagctacaaaacgcccatcgtcatcgtaaagggttaccgacctggggcgacgaagtgcgtttgtgctgggaagtggacagctgtgtggtgctgacggtttaaggagcaaagatgagtacacttgaacctgctgcccagagcaaaccgccgggcggatttaagctgtggttgagccagctgcaaatgaagcatgggcgcaaactggtcattgcgttgccatatatctggttgatcttgctgtttctgctgccatttctgattgtctttaaaataagcctggcggagatggcgcgcgctattccaccttataccgaactgatggagtgggctgacgggcaactgtccatcactcttaatctcggtaattttctgcaactgaccgacgatccgctctatttcgatgcttatctccagagcctacaggtggctgcgattagcacattttgctgtttactgatcggctatccgctggcgtgggcggtggcgcacagtaagcctagcacccgtaatattttattactactggtgatcctgccgagctggaccagctttctgatccgcgtttatgcctggatgggaatattaaaaaacaacggtgtgctgaataattttctgctgtggctgggggttatcgatcaaccgctgaccattctgcataccaatctggccgtttatatcggcattgtttacgcttacgtgccgtttatggtactgccgatttataccgcgttgattcgtattgattatagcctggtggaagcagcgctggatctcggtgcacgaccgctgaaaacgttctttactgtgatcgtgccgctgactaaaggtgggattattgccggaagcatgctggtgtttatcccggctgtgggcgagtttgtgatcccggaactgctcggtggcccggacagcatcatgatcgggcgcgtgctatggcaagagtttttcaataaccgcgactggccggtggccagcgcggtagcgatcatcatgttgctgctgctaattgtgccgataatgtggttccacaaacaccagcaaaaaagcgtgggagaacacggatgaataatttaccggtagttcgtagcccctggcggattgtgattttgctgctgggctttacctttctctacgcgccaatgctgatgctggttatctatagctttaacagcagcaagctggtgacggtgtgggccggctggagtacgcgctggtatggtgagttattgcgcgatgacgcgatgatgagtgcggttggtttaagtctgacaattgcggcctgtgcggcgacggcggcggcgatcctcggaactattgcggcggtggtgctggtgcgctttggcaggtttcgcggaagtaatggctttgcctttatgatcaccgcgccgctggtaatgccagatgtcatcacgggcttgagcctgttgttattattcgtcgcgcttgctcatgccattggctggcctgcggaccgcggtatgctcaccatctggctggcgcatgtcactttttgtacggcttatgtggcggtcgttatttctagtagattgcgggaactggatcgcagcatagaagaagcagcgatggatctcggtgcgacgccgctgaaagtgtttttcgtcattacgctaccgatgatcatgcccgcgatcatttctggctggttactggcttttactttgagccttgatgatctggtgatcgccagctttgtttccgggccgggagccaccacgttaccgatgctggtcttttccagcgtgcggatgggggtgaatccggaaatcaacgccctggcaacattgatcctcggcgcggtcggaattgtcggatttatcgcctggtatctgatggctcgcgcagaaaaacagcggatacgcgacatccagcgtgcaagacgtggctgaagacactaaaatttgccaacctggctacataatgccgcgcatgtcgcggcattgttttcatggaagacgaaacgttgggattttttaagaaaacatctagttctcatgctcgcctgaatgtgcctgcgctggtgcaggtggcggcgctcgccattattatgatccgtggcctcgacgtgctgatgattttcaatacgctgggcgtgcgcggtattggcgagttcattcatcgcagcgtacaaacctggagtttaacgctggtctttttaagcagtctggtgctggttttcattgagatctggtgtgcgtttagtctggtgaaagggcgtcgctgggcgcgctggctatatctgctgacacaaatcaccgccgcaagttacttgtgggcggctagcctggggtacggttatccggagctgttcagcattcccggtgaaagtaaacgtgaaatcttccatagcctgatgctgcagaagctgccggatatgctcatcctgatgctgctgttcgttcccagcaccagtcggcggttcttccagttgcaataatgtgtataatcgtcgcccctgatgatgtgaaggtcaatgtatgcagtgcgcactttacgacgcgggtcgctgtcgttcctgtcagtggataatgcagccgattccagagcaactctccgctaaaaccgccgatcttaaaaatctgctcgccgactttccggttgaggaatggtgcgcgccggtgagtggcccggaacaagggtttcgtaataaagccaaaatggtggtgagtggtagcgttgaaaaaccactgctcggtatgctgcatcgcgatggcacaccagaagacctttgtgactgcccgctttatcctgccagttttgcgcccgtttttgcggcgctaaaaccgtttatcgcccgagcggggttaacgccctacaacgtggcgcgtaagcgtggcgaactgaaatacattctgctgactgaaagccagagtgatggaggcatgatgctgcgctttgtactgcgttctgataccaagctggcgcaactgcgtaaggcgctgccgtggttacacgaacaactaccgcagctgaaagttattaccgtcaatattcagccggtacatatggcgattatggaaggggagacggagatctacctgaccgaacaacaggcactggcggagcgttttaatgacgtaccgctgtggatccgtccgcaaagtttcttccagactaatccggcggtcgccagccagttgtacgccaccgcgcgcgactgggtacgacagctgccggttaaacatatgtgggatctgttctgcggtgtggggggctttggtttacactgcgcgacgcctgacatgcagttaaccgggatcgaaattgcaagtgaggccattgcctgtgcaaagcagagtgccgctgaactgggcttaacgcgtttgcaatttcaggcgctggactccactcagtttgccaccgctcagggggatgtgccggagctggtgctggttaacccgccgcgccgcggcattggtaaaccgctgtgtgattatctcagtacgatggcaccgcgttttatcatctactccagctgtaacgcccaaactatggcgaaagatatccgcgaactgcctgggtttcgtattgaacgggtgcagcttttcgatatgttcccgcataccgcgcactatgaagtgctgacgctgctggtgaagcaataaaaaagccgcatgtgcggcttcagattgctgacaaagtgcgcgttgtttatgccggatgcggcgtaaacgccttatccggcctacaaaagcgtgcaaattcaatacattgcatgggccatgtaggcctgataagcgtagcgcatcaggcaattttacctttgtcatcagtctcaagccgcggttgcggctttctgaatcttactgtgggaaccactggtcactgattttttgataagtaccgtcagctttaattgctgccagcgcgttattcagtttttccagcagggctttgttatccggacgtacagcgatgcccaggccggtgccaaaatattgcggatcggtcactttctcagtagcaacaccaagttgtggattggttttcagccattcgtttaccaccgctgtgtcaccaaataccccatcaatacgaccatttttcagatcgataaaggcattctgataactgtcataagagacagttttcacttccgggtgctgatcctgaatatatttctggtgcgtagtaccgttttccatcccaatacgtttgcctttcagatcggcaaacgttttgtaggtatcttttttggcaatcacgacggcactgttttcatagtagggcgtggtaaagcttacctgtttgctacgctccggggtgatatccataccggagattacggcgtcatattttctgaatttcagggacgggatcaggctgtcgaacgcgtgattagtaaaagtacattctgcctgcatttgtttgcacaaggcttttgccagatcgatatcaaagccgacaatctcattattagcacctatagattcaaagggtggataggtggcactaacgccaaaattgattttctctgcggcagaagcaccgaaagtaaaggaagcaagtaaagcggcaagaactaactttttcatgatggaactcccgtctgtcaatcttatgatttttggccgtgtctgcggcatgggataacaatgccatcaagtgaatttatatgcaataaacatgattaaataatttaaatgaaataaaaaagacggacaacttagtgggttgtccgtcttcattataagaatttatgcactatgtaggccggataaggcgtccccgccgcatccggcacaggcaccgtgctgatgtctgatgcgacgctggcgcgtcttatcagacctacaaaaccccccggcgaatgtacgcagccacattaatttcgccgttcgaatgccagcgctttgcgctcgatcagacgcatcatcagcgtcagcaggccgttaacgaccaggtaaataatccctgccgcaccgaacaccattacatcgtaggtgcgtccgtacaacaactggctgtatcccatcacttccatcagcgtaatggtgtatgccagagaggtacttttgaataccagcaccacttcgttggaataagaagagaggctgcgtttaaaggcatacggcagcaggatcgccagcgtatcttttttgctcattcccagggcgctacaggactgccactgaccttccgggatcgcacgaattgcaccgtaaaacagctgcgtggtatacgccgcactattcaggctcaacgcaatcagcgcacataaccacggttcactcaacaaatgccacagtgccggatactcctgcaaagtcggaaactggcccggcccgtaataaatcaggaagatctgcaccagcagcggcgtaccggtaaacagcgtgatataaccccgcaccagccacaccagcaccggcgttttcagcgtcaggatgatggtaaaaatcaatgccagaatcagtgccacaatcaggctggcaacggttagcgtcaggctggtgtgtagccctttcatcagttcgggtaaatactcaaacattagctgggcctccgctcaaaacgtgtcgcgcgcaggtcaatgcgtttgagaatgtactgactgagcagggtgatcaccaggtaaatcgccgccgccacaatgtaccaggtaaatggttcctgggtacgagtagcgatgctttttgtttgcagcattaaatcattcacactaatcaaactgaccagcgcggtatctttcagcagcaccagccactggttaccgaggccaggcagcgcatgacgccacatctgcggcatcaccagacggaaaaagatagcgcttttgctcagccccagcgcctgaccagactcccactgacccaccggcaccgctttcaacgcgccccgaagcgtttggctggcataggcggcatacagcagactcagagcgatgacaccacaaaggaacgggctaacgtcgaagttctcaatgtccatctgcactgggatctgcacgaacccaagattgatagtgaagccatcgctaagcgtcagcagcagctggctggagccaaaatagataaacagcaccaccagaatttctggcaggccacgcagaatggttaccagcgcactacctgcccacgcgacaggacgccattttgcgctctcccataccgcaaagaacatcgccagcgccagcccgacaatcaatgcacaaacggcaaggccgacggtcatcccggcggcgcttgctaaaggaaaaaattcattcatcaggaattacttctggaaccatttgttgtagatggtttcgtaagtgccatctttcttcactttttccagcgcagtgttgagtttctgctgcagctcagtgttgccctgacgtaccgcgatgccgaggccagtgccgaagtaatctttatcggtcactttgtcgcccaccgccgccagtttcgggttatctttcagccactcagtgaccactgcggtgtcaccgaagacgccgtcgatacgcccgttttgcagatccagttttgcgttctggtagctgtcatacggaacggtagtgatttccgggtgcttatccataatgaatttctggtgtgtcgtcccgttctgtacgccgacttttttgcctttcagctgatcaacactggtgtatttgccttgctgacccacaaacagggcagagttgtcatagtacggggtggtaaacagcacctgcttttcacgctccggagtgatatccatgcccgccatcacggcttctacgcgacggaatttcaggcttgggatcaggctgtcaaacgcctggttagagaaagtgcaggttgcatcaatctctttacacagcgcttgtgccaggtcgacgtcaaaaccaacgatctggttgtttgcatcaatgctttcaaacggaggataggaggcttcggtagcaaaacgaatggtttcggcagctgtggcggaaagactaaaacctgcaattaacgcggcaatcagaacttttttcattgttgttatcccgaatcttagtgagagagatagtttttaaatgcttcggtttgcggctcggtaaagcagctcgcgtcgccttgttctacgatatgaccattttccatatacaccactcggctggcggttttacgcgccacttcaacttcgtgggtgacgatcacctgggtaatattcgtttctgccagctcacgaatgatgctgacgatttgtgccgtaatttccgggtccagtgcggcggtcggttcatcgaacagcagtacctgcggttccatcatcaacgcacgggcaatagcaacacgctgctgctgaccaccagaaagatgcagcgggtaacgatcgctataaggtttgagacgcagacgttccagcagtttttctgcacgggccagcgcctgatctttactcaaccccagtacacggcagggcgcttcaatcaggttttgctgcacggtcagatgcggccacaggttgtattgctgaaacaccatgccaacgttacgacgcaaatcgcgaatcgctttgtcagagggtgttttggtgaaatcgaaatggttgcctgcaatgttgagcgtaccggagcgcggcatctcaagcagattgagtacacgcagcaggctgcttttacccgcgccgctggggccaagtaacaccagcgtttcgccctgtgggcaatccagcgtgatatcgaacagcgcctgatgcgcgccgtagaagcaattaatgccgtttaattgaatactcattgacactcgtatactggcagtctgatagctattgaggtcgaagatagtacctttgacagaataattatgcaatatttctgctttaaaagttaaaagcaaagcgcattattcaataaacatagcacaaaataacgggggcggtggtcggcgagcataaatgtcggcattcctcacgaaatgccggacaatttacggggtttattggttgatcaaggcgttagcgattctcgatggactgacggagcgtacccgccgtggcatgaacgctaccgcctaagtaacgcacatcgtcgatgacccaacactggccttcctgaatcattaacacttcatcctgccaaccctggtcaccctgtttgagatccacgcgcaatggaatgttacgggcatcacgattagggatagtgcttgcactggcaacgtgggcgctatctggcaaggtggttcgactggagaatggatcgttggtcagtagttcccgatggttattatcccgggaggcatcgctaagcagtgtcgccagtttgtcgctcagataagggcgcaaggcggtgatgtcgttgctgcggtgcaaaatgcggtagtcataaaattgctgggccacgttatccgggcctccttcaacgcaaggaccactgcgtgtgccgttatctttataagctggagtgactgtggtgcaggcactgaggagcagtgcgcaggggataagcattgtcaatttgctgtagcgcataatgatttccttataagcgatcgctctgaaagcgttctacgataataatgatatcctttcaataatagcgtatcagtctgataatgcttttgagatcgaaggcttagcaaacaaggagatcgatcatgcaattttctacaaccccaactctggaaggccagaccatcgttgaatattgcggtgtggtgaccggcgaagcgattttaggtgccaatattttccgtgatttctttgccggtatccgcgatatcgttggcggacgttccggtgcgtatgaaaaagaactgcgtaaagcacgggagatcgcctttgaggaattaggctcccaggcgcgggcgctgggggccgatgccgtcgtcggtattgatatcgactacgaaacggtcgggcaaaacggcagtatgctgatggttagcgtcagcggtacggcggtgaaaacgcgtcgatgagaagattcttctggctggtcgctgccgctctgttattggcagggtgtgcaggcgaaaaaggcattgtcgagaaagagggatatcagcttgatacccgacgccaggcgcaggcggcgtatccgcgcattaaagtgctggtgatccactacaccgcagatgattttgatagcagcctggcgacactgaccgataagcaggtcagcagccattatctggtccctgcggtaccaccgcgatacaacggtaaaccgcgcatctggcaactggtgccggaacaagaactggcctggcatgcggggattagcgcctggcgcggggcaacgcgccttaacgacacctctattggcattgagctggaaaaccgtggctggcaaaaaagcgccggagtgaaatattttgccccgtttgaaccggcacagattcaggcgcttattccactggcgaaagatattattgcccgttatcacatcaagccggaaaacgtagtggcacatgcggatatcgcaccgcagcgcaaagacgatccggggccattatttccctggcagcaactggcgcagcaggggattggtgcctggccggatgcgcagcgggttaacttttaccttgccgggcgcgcgccgcacacaccggtagataccgcgagtttgctggagcttttggcgcgctacggttatgacgttaaacctgatatgacaccgcgcgagcagcggcgcgtgattatggcattccagatgcatttccgcccgacgttatataacggcgaagcggatgcagaaactcaggcgattgccgaagcattgctggagaaatacgggcaggattaacgcggcagttttccgtggtcgcgtagccaggcggcagttttctcgataccttcatccagggtgatgaccggctgataacctaactcttcctgcgcacgcgtaatatccagcgtaaagtcaaaattcaacttggagacgccgtagtgggtcagcggcggctcttttgcactcttgcggcctaaacgctccatgctgcgggcgatcatatccagcatcgggtaggggacggaacgaatacgacagtcaatattcaactcgtcgatcagcttctgcacgatgctgcgcagtgtgcgatgctcgccgttggtgatgttgtacacacgcccggaaggtagcttatcgcaggcttcctggcttgccagccacattgcgtgcacggcattttcatagtaggtcatatcgaccagcgcactgccgccatgcggtaacagaatactgccgtagtggtgcatcatatgcgccagacggggaataaagactttatcgtgcggtccgaacagactttgtgggcgcagaatagtaaagcgcgtttgtggattcgcctggctaagcatattgatcacttcttcgctggctgctttgctgcgggcaaactcgttggcgaagcggtgagggcgaaaatcttctttaatatcgcgatggtggtgataatcgaagtacagggagggggaagagatatgaataaagttacgcacaccccaggcgacagcccattcacccaggcggcgagtggcgcgaacgttagccagatcgaaagcctgttgtgtcccccagggactggtaaagctggagcagtgccacagcgtatcaatgcccgcgagcatcactttagcttgactactaaccagctcggtcagatccgccggaacaaactctgcgcccattttttccagcaatttgcccattgcctcgttgcgaccggtcgctcgcacgctgatgcctttctggcataaaaactctaccgcgtttcgacctaagccgctggtggcgccggtaaccagtaccttcatatcaatccactgttgttgagaaaataacgtgcgcattcttccgtgatttcccccatgatgcaatgggaaacatgaaagaataacgcaggttttgtcgattaatctgtgctttgttctgccagtctggcgatttgttttgccattccgcgaaaaataaacagatgcgcggggatcatcaataaccagtaaaacagccccggcataccgtgcggatgccagaaagcgcggacatcgatagtacgatagtcgcctttatcttccaggctaaaacacagtcgtcccagccccggcgctttcatgccaaataacaacgtaagttgtttttccggttcaacgacaatcactttccagctatccaccgcatcgccagtctgtaaatattcgcgctccgggcggcctttcgccagcttatgaccgatcgcgcggtccatcaacgcccgtgtctgccacaaaatattgccaaagaaataacgctctttaccgccgatttggttcactacctgccataaagcagcaaggctggcggacgttttaacggtaaaccccgcctgtttggcaaaataaccgtactccggtcgccagcgggcaaaggcctgagcgtcgtagccccagtcgctggagttgaccagtttttcctcctctttcaacgtgctacgtaccgcgtcatcgaaagcgatcagccgttgtgggatgagtgcacgtagcgcggtatcatccgccagcagatcgtgtttcagcccctgaatcaacgccctggcggtggtgggcggtacggaagtaatcacattgagaaaccacacgctaatccagcgggtggggagggggatggggatcaaccagcggcgcttaccgctcaccgccataaaatgttcaaactgttgctgataactgagcacctctggtccggcggcttcgaagatgcggtgttcgctggccggatgatctaacaacgcaaccagatagtgcagcaagttttccagcgcaatgggcgtggtgcgactacgaacccagcgcggaggcgttaagactggcaggttgtagaccatatcgcgcatgacttcgaacgccgcggaacctgcgccaacgataattccggcccgcagttcggtcacgggtacattcgcttcacgcagaatgtccgccgtagcctgacgagcacgcagatgatcgctctgctcatgtggcggggcctgcaagctactaagaaagattaattgcttaactggtacttcacgtagcgcatcgcggacgttgagagccacctggcgctcctgagcgataaaatcgccgccttcgcccatgctgtgcaccagaaaatagaccgtatcgatatcctgcaacagggccggtaggttatccggccagctgagatcgactttatggcaactgacgtttgccagttgcagctttgcaagcctgtcgacatgacgtgccgccgccaggatctgatgcccttgctggctgagtgtgcgcaccagatgctgaccaatgtagccactggcaccgagaactaaaatgcgttgcggcacgtctctctccttaacgcgccaggaatgcacgccagtgggcggcgacttccgccagttgttcgcggctgacgtcaagatgcgtcaccaggcggacaatcgggctggcgttaatcagcacgtttctcgctttcatgtattcgcctaacgcggcagcattttcttccccgacgcgaacaaacagcatattggtgtcctgacgcatcacatccgcgcctgcttcacgcagctgctccgccatccaggcagcgttgtcgtggtcttcctgcaagcgcgcaacgttatttttcagggcatatatcccggcggcagccagaatgccggactggcgcatcccgccacctgtcattttccgccagcgaatggcacgtttaatgtaatcacgattaccgacgagtaaactaccgactggcgtcccaagacctttgctcaggcaaatggtgaagctatcacaatattgcgtgatctctttcagttcgcagccgtaagccaccacggcattaaagatgcgcgcaccgtcaacatgcagcgccagattgcgctcgcgggtaaattcccatgcttctttcaggtattcccgcggcaacactttgccgttgtgggtgttttccagactgagtaatttggtgcgggcgaaatggatatcgtcgggtttgattttcatcgccactttatccagcggtagcgtgccgtcggcagccgcgtctatgggttgcggttgaatactgcccagcaccgccgcgccaccggcttcaaacagatagttatgcgcggcctgaccgacaatatactcttcgccgcgttcgcagtgactgagcagagcgaccaggttggcctgagtgccggtaggcagaaaaatggcggcttctttaccggaaagctctgctgcgtagtcctgcagagcattaacggtagggtcgtctccgtaaacgtcgtccccaaccggggcggccatcatcgcttcgagcatggcgcggcttggtcgggtaacggtatcactgcgtaaatcaatcatggcatgtccttattatgacgggaaatgccaccctttttaccttagccagtttgttttcgccagttcgatcacttcatcaccgcgtccgctgatgattgcgcgcagcatatacaggctgaaacctttggcctgttcgagtttgatctgcggtggaatggctaactcttctttggcgaccaccacatccaccaacaccggaccgtcgatggagaaggcgcgttgcagggcttcatcaacttcagacgctttttctacacggatacccgtaatgccgcacgcttcggcaatgcgggcaaagtttgtgtcgtgtagttcggtgccgtcagtcaaatagccaccagctttcatctccatcgccacaaagcccagcacgctgttgttaaagacgacaattttcactggcagtttcatctgcactacactgaggaaatcgcccatcaacatgctaaaaccgccatcgccgcacatggcgaccacctgacgttctggctctgtcgcctgcgcacccagcgcctgcggcatggcgttagccatgctaccgtggttaaagctacctaacaggcgacgcttgccgttcatttttagataacgtgccgcccacaccgttggcgtaccaacgtcacaggtgaaaatagcgtcatcggcggcaaaatgactaatttgctgcgccagatattgcgggtgaatggctttctcgctcggtttagctaaatcgtccagccctttgcgggcgtcgcggtaatcttccagcgctttatccagaaacttgcgatcggctttttcttccaccaatggaagcaatgcacgcagagtgctcttgatatcgccgaccagtgccatatccaccttgctgtgagcgccgatgctggctgggttgatatcaatctgaatgattttggcatcggtcgggtagaaggcgcggtagggaaattgcgtgccgagtagcactaacgtgtcggcgttcatcatggtatggaaaccactgctgaagccgattaacccggtcattccaacatcatacggattatcgtattcgacatgttctttaccgcgcagggcatgaacaataggcgctttaattttcccggcaaactcaactaactctttatgcgcccccgcgcagccgctgccacacatcagggcgatattgctggaataacgcagcagttgcgccagtttgcgtaactcttcttcttccggcgtcacgactggttgtggcgcatgataccagtgcatggttgccccttctggcgcaggttttaacgccacgtcgcctggtaacacgacaacgctaacgccacggttaagcaccgctttgcgcatggcaatcgccagtacttgtgggatctgctccgggctggaaaccagctcgcaatagtgactacattcgcggaatagctcttgtgggtgggtttcctggaaatagccgctgccaatttcgctggagggaatatgagcggcaatcgccagtaccggaacgtgattgcggtggcaatcgaacaggccgttgattaagtgcaggttgccggggccgcagcttccggcgcagaccgccagttctccgctaagttgtgcttcagcgccagcggcaaaggccgccacttcttcgtggcgggtggacatccactcgatggtgcccatgcgattaagactgtcactaagaccgttcagagagtcgcctgtgactccccagatgcgtttcacccctgcgctttcgagtgttttggcgatataagctgcaaccgtttgtttcatggttctccatctcctgaatgtgataacggtaacaagtttagttcatctgacggagggggaagggatgggagagaaaggaggcactaacggttaaatagcccgatgaaaggaatatcatcgggcataaggcgattatgcgagaaccaaatccccctgcggatggcaggagcaggccagtacgtaaccttcagcgatttcggcgtcggtcagcgtcattgtgctgctcaccgtatattcaccggaaaccacttttgtcttacagcagccgcaaacacccgcacggcaggcagcgacaaccggaacgttattgctttccagcgcctccagtagcgtggtgccaaccggggcgtaaaattctcgtgccggttgcagtttggtgaatttcagaccgctggtcgccgcttctgctactggggtgaagaatttctctttaaagaaacgcgtcacgccgagcgctttcacttcctgctctacccaatccatatacggagccgggccgcaggtcatcacggtacgactagctaagtcaggtacacctgccagcagttcgcgagtgagacgaccagcgataaagccttcggtaacgttattttctgccaccagcgttaccggatagttacgccactcatcggcgaaaataacatcctgcggcgtacgcacgttgtagatcacccgcacatcggcctgtggacggttcttcgcaagccagcgacgcatgctcataatcggcgtgacgccgcagcctgccgccagcaacaggaatttatcttctgctttatcgtcgcaggtaaattcccccatcgcgtcgctaagccagagataatcaccgcgttttacatcgcgcgtcagccactgggagccgacaccgtcatcaatccgccgcacggtcagggtgatatattcactcacgcctggcgtggaggaaatggtgtaagcacgcagcgtttccgcactgtttcgcacgctgaccagtgcatattgcccggcgcgatatgggtagtaatcgtggcaaatcagggaaatcgtccacacatccggcgtttcttgcgtaatgtgatgaacctgcatccgccacgggcattgattcgttggcatcgtcatcgacaaactccttacgcgctcaacagttgcttcatgtcttcttcaacagtggtgatagaacgcaggccgaatttctcgttcagcaccgccagcaggtctggtgtcaggaaaccaggtgcagtcgggccggtgacgatatttttcacgcccagagaaagcagcgtcagcagaatgacgatcgctttctgttcaaaccaggagagcaccaggctcagcggcagatcgttgacaccgcagcccagtttctctgccagagtgacagccagaataatcgcactgtaagcatcgttacattgacctgcatctaccagacgcggcagaccttcgatatcgccaaactcaagtttgttaaagcgatatttaccacaggcgagggtcaggatcaggcagtcatccggcacgctggtggcgaaatcggtgaagtagtggcgctcgccgcgtgcgccgtcacagccaccaagcaggaagatatgacgcagtttttcacggctcaccagatcaatcagcgtatcagcagcgccaagcagcgtctggcgaccaaaacccacggtgataaggtgcggaatttcgctgtacgggaagcctgccatctgttgcgcctgggtgataaccgcagagaaatcatcaccgtccagatgacgcacgccaggccagccaacaatgctgcgggtccagatacgatcgtcataagcgcctacggttgggtcgatgatgcagttgctggtcatcacgatggggccagggaaacgagcgaactccacttgctgattctgccagccgctgccgtagttaccgaccagatgcttgaatttacgcagctccgggtagccatgcgcaggcagcatttcgccgtgggtgtagacattaacgcccgtgccttcggtctgttccagcaggttgtagagatctttgagatcgtgaccggaaatcagaatgcatttacccgccgtcgctttgacgttgacctgggttggcgtcgggtgaccgtatttaccggtttcgcctgcatccagaatgctcatcactttgaagttcatctggccgatttccatactacactcaagaagcgcgttcatatcggcaggccaggtccccagccacgccatgattttatggtactgggcataaatatcgttgtcgtattgaccgagaacatgcgcgtgttccatataggccgccgcacctttcaggccatacaggcacagcagacgcaggccgagaatgttttcgccaatcgccgctttatctttgttaggggtaaattctgctgcctgacgttgcagctcgccgagatcgtcgctcaccagttgcaggtcagccatcgggttatcgacgcgcgcgttggcatctacagccaggcattgcgctttcagcgcctcgcgcagggcaatcgcttcacgagcgtagccgacaatacgcggagaatcgaagttaacgttggtcagggtactgaaaaaggcacgtggcgcgaagctgtcaacatcgtggttgatgatgccgtattcacgcgcttttaccgcccaggcagaaagcccttgcagcgccgcgatgagtaaatcctgaaggtcagaagtttccgccgttttaccacacatcccctgcgcgtaactgcagccgtttcctgccggagtacggatagtttgttcacattgcacacaaaacatgatcacaccttttaaagttatatttaatatacatgtttaaggttaagacgcttaacgcggggataaaagggatttttcatgcaactttaagggagattgatttagcgcaattttggcggcagggatctaccgccagagaggtattacgcagagaaaaaggcgatgaggatcggcactaacaggctaagaataaaaccgtgaacaattgccgccgggaccatatccagcccgccagtacgttgaagaacgggcagggtgaaatccatacttgtggcaccgcataagcccagtgcagtagagcggctgcggcgaatcagcccagggatcaacataatagcaatcagttcacgggccagatcattaaaaaacgccgcgctcccgattaccggaccaaaagattcggtcaataaaataccggaaagagaataccagccgaaaccggaggccattgccagcgcggtattgatggggagatcaagaataaaggcgttaattaaaccaccaattaaactactgacaaccaccaccacggcgacaatcattccccggcgattaaggacaatctgctttaaggtcatgccattattgcgcaactgaataccaacgaggaaaagtagcaaaattaacgtgtattcactggcttcggtcgcgtgttgtaagaaagccagtccacttagaccaatggcaaaaccaatcactactacgccgcacagttttaggctctccagcgccatcgcaatacggctcgggagtttttcttgctgatggtggttgcgccacggcaggcctcgctccagccacatcagggcggcaatattacacagtaaaataacggtaatactgacggcagaataatgcagaatcgccaacaggttactggcgaggttatcgagaaacgccagactgatacccataaaaaagagaataaggtaaaccatccagcttaatagctgattaataacttttaacgcagcttgttggcgaagcggaatgaggtaacccacaatcaggggaaccagaatgattaacagcccagaaaacatgaaaacccagtccttgcaaagatgaagtcgaaatgcgcgatgacacactactgaaagcggaaggacgagtaaagttgcaattaaaaggaaatgttatgcataaggagcagtagagtattcgttttcatttaaagatattcttgcgctttaattacaaactgcaccgatgttggtggcgtcaaaatcgccgaggcgttccctgaaggccggggcagcccacatggatgtgggctgagggcgcgttttacagggatgttacctcgcgcccgacccggtagccgtaagggataagtcgagggcaccgcgcagcggcgattttgttcgccagagcccgggggtgcagggggcggcggcgattggccgccccctgcgcgctccttgcgccagtggcaatatgttgcttagctcatgaaaggagcgcaacaagatgatgaatcaacatataacaacatcttaaaaaaaggcctgacattacgccaggccttctgcgttaattaatcacgcttttccagcagggtccggtaaatcagaccaccgataatgccgccgacaattggcaccacccagaagaaccacagttgttctaatgcccagccgccctggaagatagcaaccgcggtgctgcgcgccgggttaacagaagtgttagtcaccggaatactaattaagtgaatcagggttaaggccagaccaatagcgatcggcgcaaaacctgccggcgcgaatttgtcggttgcgccgtggatcaccaacaggaaacctgcactcaataccagttcaactaccagcgcggaaagcatggaataaccgcctggactatgctcgccataaccgttagaagcaaaaccgctggctgccgcgtcaaaacccgttttaccactggcaattaaatacagcagcgccgctgcaacaataccgccgacaacctgggcaattacgtagccaacgacttcttttgccggaaaacgtccgccagcccataaaccaatagtgaccgccgggttaaaatgaccaccagaaatatgaccaacagcaaaggccatcgtcagaacggtcagaccgaacgccaacgccacgccggcaaaaccaatgcctaattccgggaagcctgcggccagtacagcactaccacagccaccaaaaacaagccagaaagtaccaaaacattcagctgctaattttctgaacatatccaccacaattaaaaattgaccctgtgaaaaatatggtcgttttatagggtcgtcgtaaaaaagtgacgacggaaataatgcgcggctattttaaaaacgaaggcgagtcattcaccagataaataaatccagtaaatttgatttagggcaacagcgggttgccccatatagtcatttgtctgattgacagtgtagtgcacgcaaaagatttaatcctttaggcgtaataaaaaataatttatcatgctaattatttgattttgttgtttttgcagacttatcagcaagagggagtataacgcgattattcgctcatttttcagacatttgccatgcttaaatgtgatgtcatcacgtattagcaaggcctttcccgttatactgccagcgtaaaggataagtcacatatttctggaggggatatgattcttgagcgcgttgaaattgtgggttttcgcggtatcaaccgtttgagcttgatgctggaacaaaacaacgtcctgattggggagaacgcgtggggtaaatccagcttgctggacgccttaactctgctgctaagcccagaaagtgatctctaccattttgagcgcgacgatttctggttcccgccgggagatatcaacgggcgagaacatcatctgcatattattttgaccttccgcgaaagcctgccaggccgacatcgggttcgccgttatcggccgctggaagcgtgctggacgccatgcaccgatggctatcaccgtattttttatcgtctggaaggggagagtgcggaagacggcagcgtgatgacactgcgcagttttctcgataaagacggacatccgattgatgtcgaggatattaacgatcaggcacgccatctggtgcgtttaatgccggtgctgcgcttgcgtgatgcccgttttatgcgccgtattcgtaacggcacggtgccaaatgtccctaatgtggaagtcaccgcgcgccagctcgatttcctcgcccgtgagttatccagtcatccgcaaaatctctctgatgggcagattcgtcagggactttccgcaatggtacagctgcttgagcattatttctctgagcagggggccggacaggcgcgatatcgtttaatgcggcggcgagccagcaatgagcaacgaagctggcgctatctggatatcatcaaccggatgattgaccgacctggtgggcgcagctatcgggttattttgctcggcctatttgctactttgttgcaggcaaaaggcacattgcgactggataaagacgcccgtccattgttgctgatcgaagatccagaaacccgtttacaccccattatgcttagtgttgcctggcatctgttgaatcttctgccattgcagcgcattgccaccaccaacagcggtgagttgcttagcttaacgccggtagagcatgtttgccgactggtacgtgagtccagccgcgttgccgcctggcgtctggggccgagtggcttgagtaccgaagatagccgacgcatatcctttcacattcgttttaaccgtccgagtagcctgtttgcacgctgctggttgctggtggaaggggaaacggaaacctgggttatcaatgaactggcgcgtcagtgcggacatcattttgatgccgaagggatcaaggtcattgagtttgcccagtccgggctaaagccactggttaaatttgcccgccgaatggggattgaatggcatgtactggtcgatggcgatgaagcagggaagaaatatgccgctacggtacgcagcctgttgaataacgatcgggaagccgaacgagaacatttaacggcgttaccggcgctggatatggaacattttatgtatcgccagggattttccgatgtgttccaccgcatggcgcaaatcccggaaaatgtaccgatgaatctacgcaaaattatcagcaaagcgatccatcgctcttccaaacccgatcttgccattgaagtggcaatggaggcaggacgtcgtggtgtggactccgtaccgacgctgctgaaaaaaatgttcagtcgcgtgctgtggctggcgcgcggtcgcgcggattaaccgcgaaacatcgtggccatttgtggctgaatagcgtcgagcatctcatagcgccgacggtattcagcccgttttttactggcgatttcggcaatctcttttcgtgctatctgtgctggaaggcggtaatggcgttcagcatcacatacgccgccaacgctttcccagaaagcgttgtaatcagcgtggatcttgccttctttatcgcgataacgcaggctgcggtaaatatgcgtttcattgctgacggcaataatctgctctacctgcaaacgttgggcaaacagacaggccgcttccatcacgaggcgtttgggaaatagcccgtggcaggctttcgtcgcattctggatttcctgatgtggaatttcccattttgcgccttgcagtccgccaataaacatcgttcttttcccctgatattcacacagggtaaacgtgatctctgccagaggaataccttcgctgttgcggaacaggattgtgctgtcaccttctttatccatactgatcatcatggtcagctcaagcgtgaactgctcgccgtttttgccttccagcttcgccagttgcagcccgggggtattcaaatataagctgaattcttccgcgctcatacattcgcggagtaacgcataatggtaacgtaacgcctccagcaattgcttacggctaagattcgccgcaaggtaagggcgatgcagacgcacaggcagtcgcggctggcgcgttaacaatacattgagattaggccagtgggaaagttcgttcatccactcaacgcttaaacgcggcataatcaagctgcgcagcaaaaatttctggcgaaaactacggcgatgccagaatttacccggccgacactgtccacgtgccagactaagaaaaagactcaggctgctgagagattcagatggcgtaaaggtccgttcagttagctggctcatattcatgaaatcaatggttatacatggcgtgcttttcaccattgcgtatcttaaccaaacatcaatagtgtgattactaacgtaaattttagggttttgttgatatttcgttgaagttaatgacccggattggcatatggagtattcagaaaatttatgaaaaagcggaaaaccgtgaagaagcgttacgttattgcgctggtgatagtcatcgccggactgattacgttatggagaattcttaacgcacccgtgccgacttatcagacgctgattgtgcgccccggtgatttacagcaaagcgtgctggcgaccggaaagctggacgcgctgcgtaaggttgatgtgggcgcgcaggtcagcggtcagttgaaaactctgagcgtggcgattggcgataaagtaaaaaaagaccagcttttaggggttattgatcctgaacaggctgaaaaccagattaaggaggtcgaagcaacgctgatggagctacgtgcgcagcggcagcaggcggaagcggagctgaaactggcgcgggtgacgtattcccgtcagcaacgtctggcacaaacgaaggctgttagtcagcaggatctcgacaccgccgcgacggagatggctgtgaaacaggcgcaaattggcaccattgacgcgcaaatcaagcgcaatcaggcttctctcgatacggctaaaaccaatctcgattacactcgcatcgttgccccgatggccggggaagtcacgcaaatcaccactctgcaaggccagacggtgattgccgcacaacaagcaccgaacattctgacgctggcagatatgagcgccatgctggtaaaagcgcaggtttctgaagcggatgtaatccacctgaagccggggcaaaaagcctggtttacggtgcttggcgatccactgacgcgctacgaggggcaaatcaaggatgtactaccgacgccggaaaaggttaacgacgctattttctattacgcccgttttgaagtccccaaccccaatggtttgctgcggctggatatgactgcgcaagtgcatattcagctcaccgatgtgaaaaatgtgctgacgatccctctgagcgcgttaggcgatccggttggcgataatcgttataaagtcaaattgttgcgtaatggtgaaacacgcgagcgtgaagtgacgattggcgcacgtaacgataccgatgttgagattgtcaaagggcttgaagcgggcgatgaagtggtgattggtgaggccaaaccaggagctgcacaatgacgcctttgctcgaattaaaggatattcgtcgcagctatcctgccggtgatgagcaggttgaggtgctgaagggcatcagcctcgatatttatgcgggtgagatggtcgcgattgttggcgctagcggttccggtaaaagcaccctgatgaatattctcggctgtctggataaggccaccagcggcacctatcgcgtcgccggtcaggatgttgccacgctggacgccgatgcgctggcgcaactgcgccgcgagcatttcggctttattttccagcgttaccatttgcttagccatttaaccgccgagcagaacgttgaagtacccgccgtctatgctggtcttgagcggaaacagcgactgcttcgtgcccaggagttgctgcaacggctggggctggaagaccgtacagagtattatccggcacagcttagcggtggtcagcaacagcgcgtcagcatcgcgcgggcattgatgaacggtggtcaggtaattcttgccgatgaaccaaccggcgcactggacagccattctggcgaagaggtgatggcgatcctgcatcagctgcgcgatcgtgggcatacggtgattatcgtcacccacgatccgcaggtcgctgctcaggccgagcgggtgatcgaaattcgcgacggcgaaattgtgcgcaatcctcccgccattgaaaaagtgaatgttactggcgggacggaacctgttgtcaacacggtgtctggctggcggcagtttgtcagcggttttaacgaggcgctgacgatggcatggcgggcgctggcagcgaataaaatgcgtactttactgaccatgctggggattattatcggtattgcgagcgtggtttccattgtcgtggtgggtgacgccgccaaacaaatggtgctggcggatattcgttctattggtacgaatactattgatgtctatcccgggaaagattttggcgatgacgatccgcaatatcagcaggcgctgaagtacgacgacttaatcgccatccaaaaacaaccgtgggtcgccagtgccacacctgccgtcagccaaaacctgcgcctgcgttataacaatgttgatgttgctgccagtgccaatggcgtgagcggcgattattttaatgtctatggcatgaccttcagtgaaggaaacacctttaatcaggagcagctgaacggtcgtgcgcaggtcgtggttctcgacagtaatactcgccgccagcttttcccccataaagcagatgtggttggcgaggtgattctggtcggcaatatgcccgccagagtcattggtgtggcggaagaaaaacagagcatgtttggtagcagtaaagtgctgcgtgtctggctaccttacagcacgatgtccgggcgagttatgggccagagctggcttaactccattactgtcagggtgaaagaaggatttgacagcgccgaggcggaacagcaactcacgcgtttacttagtctgcgccacggaaagaaggatttctttacctggaacatggacggcgtcttgaaaactgttgaaaagaccacacgtactttacaactgtttctgacgctggtggcggtgattagcctggtggtgggcggtattggtgtaatgaatattatgctggtgagtgtgaccgagcggacgcgggaaattggcattcgcatggctgtaggtgcgcgagcaagcgatgttttgcaacagttcctgatcgaagccgtactggtttgcctggtcggtggcgcgttgggaataacactgagtctgttaattgctttcaccttgcagcttttcttacccggctgggagattggttttagtccgttggcgctgctgctggcgtttctctgcagcacggtcaccgggattttatttggctggttacccgcacgaaatgcggcacgactggatccagtagatgctctggcacgagagtaatttttgagataaaaatgccagccgatcgggctggcattttgcctttaggatgtacacaatgagacagaagagttatgcgactgccgcttctacttcgacgggcacaataacactggcgtgattgccttttggcccctggtggacatcaaactgaacggattgtccagcttttagcgttctgtaaccatccatctgaatggtggaataatgagcgaaaatatcttcgccgccgccttcagggcagatgaaaccaaaccctttggcattgttgaaccacttaacagtacccttttccatgcttcgacatccttcgcaaatcttatacaagtaagatggaataaaccggggtcagagagggggctgttcaaaacctcgccaactctagaaatacaatttagagaattagggcgagccgtcaagcatttgacaggggacaaggggcaggtatgaatcaaaaatttgaagcagttaacgctattgacaggaatgtgacagatgtcgctgatgccaacgatagatgatagttatctatcatgtggagtagattggtcaggcaaataagctcttgtcagcggcagggcgttctgccgataaccgtaaccgaagatgataactgacaatgggtaaaacgaacgactggctggactttgatcaactggcggaagaaaaagttcgcgacgcgctaaaaccgccatctatgtataaagtgatattagtcaatgatgattacactccgatggagtttgttattgacgtgttacaaaaattcttttcttatgatgtagaacgtgcaacgcaattgatgctcgctgttcactaccaggggaaggccatttgcggagtctttaccgccgaggttgcagaaaccaaagtggcgatggtgaacaagtacgcgagggagaatgagcatccattgctgtgtacgctagaaaaagcctgaatgcaggcataaaaattgggggaggtgcctatgctcaatcaagaactggaactcagtttaaatatggctttcgccagagcgcgcgagcaccgtcatgagtttatgaccgtcgagcacttgttactggcgctgctcagtaacccatctgcccgggaggcgctggaagcgtgttctgtggatttggttgcgctccgtcaggaactggaagcctttattgaacaaaccacacccgttctgcctgccagtgaagaggagcgcgacacacagccgacgctgagttttcagcgtgtactgcaacgtgcggtcttccatgtccagtcctccggtcgcaatgaggttaccggtgcaaacgttctggtcgctatctttagcgaacaggagagccaggcggcatatctgttgcgtaaacatgaagtcagccgtctcgatgtggtgaactttatctctcatggcacgcgtaaagacgagccgacacagtcttctgatcctggcagccagccaaacagcgaagaacaagctggtggggaggaacgtatggagaatttcacgacgaacctgaatcagcttgcgcgcgtgggcggaatcgacccactgattggtcgtgagaaggagctggagcgtgctattcaggttctctgccgtcgccgtaaaaacaacccgctgctggtgggggaatctggtgtcggtaaaaccgcgattgcggaaggtcttgcctggcgaattgttcagggcgatgtgccggaagtgatggctgactgtacgatttactctctcgatatcggttctctgttagcgggcacaaaatatcgcggcgactttgaaaaacgttttaaagcgttgctcaagcagctggagcaggacactaacagcatcctgtttattgatgagatccacaccattatcggtgcgggtgcagcgtctggtggtcaggtcgatgcggctaacctaatcaaaccgttgctctccagcggtaaaattcgtgtaattggtagcacaacctatcaggagttcagcaacattttcgagaaagaccgtgctctggcgcgtcgcttccagaaaattgatattactgaaccgagcatcgaagaaactgttcaaatcatcaatggcctgaaaccgaagtatgaagcgcaccacgacgtgcgttataccgcaaaagcggtgcgtgcggcggtagagctggcggtgaaatacattaacgatcgtcatctgccggataaagccattgatgttatcgacgaagcgggcgctcgcgcacgcctgatgccggtaagcaaacgcaagaaaaccgttaatgtggcggatattgagtccgtggtggcccgtattgcacgcattccagagaagagtgtttctcagagtgatcgtgataccctgaaaaacctcggcgatcgcttgaaaatgctggtcttcggtcaggataaagccattgaggcgctgactgaagccattaagatggcgcgtgcaggtttaggtcacgaacataaaccggttggtagcttcctgtttgccggccctaccggggtcgggaaaacagaggtgacggtacagcttagcaaagctttgggcattgagcttctgcgctttgatatgtccgagtatatggaacgccataccgtcagccgtcttattggtgcgcctccgggatacgttggttttgatcagggcggtttgctgactgatgcggtcatcaagcatccacatgcggtgctgctgctggacgaaatcgagaaagcgcacccggacgtgttcaatattctgttgcaggtgatggataacggtacgctgaccgataacaacggacgcaaagcagacttccgtaacgtggtgctggtgatgaccaccaacgccggggtacgggaaactgagcgcaaatccattggtcttatccaccaggataacagcaccgatgcgatggaagagatcaagaagatctttacaccggaattccgtaaccgtctcgacaacattatctggtttgatcatctgagtaccgacgtgatccatcaggtggtggataaattcatcgtcgagttgcaggttcagctggatcagaaaggtgtttctctggaagtgagccaggaagcgcgtaactggctggccgagaaaggttacgaccgggcaatgggcgctcgtccgatggcgcgtgtcatccaggacaacctgaaaaaaccgctcgccaacgaactgctgtttggtagcctggtggacggcggtcaggtcaccgtcgcgctggataaagagaaaaatgagctgacttacggattccagagtgcacaaaagcacaaggcggaagcagcgcattaatctgattgttaggtaggttggtcaagtccgtaatctcgaaagaggttacggactttttgtttatggggtggaggaggttcagaccctttttttaatgatgatggtaagttgttgataattagtgctgcgggaaggtaaggataaaaaagggtgctgcaggagaatgggatggttttgctttattaacaacgggctaaacgtgtagtatttgagttcactgccgtacaggcagcttagaaattcacaggtaacatactccacccgcccaccatgttcactgccgtacagacagataaaatgcgaaaaaaaagctcgcactttcgtacgagctcttctttaaatatggcggtgagggggggattcgaacccccgatacgttgccgtatacacactttccaggcgtgctccttcagccactcggacacctcaccaaattgttttgctaccaaacctcatgggtggcaacggggcgctactatagggagttggagtaaaacggtcaagaagaattttaatgataattattgtttgctcatactgtaaacaagttgtgcagtatatctacatcgagacaagttacggacttatacttccaaagtacttcatacatatcacaaaataaaaaggccggttaaaccgaccttttactcgttctttctcttcgcccatcaggcggtaaaacaatcagcgactacggaagacaatgcggcctttgctcaggtcgtacggggtcagttcaacagtcactttgtcgcccgtcaggatgcggatgtagtttttgcgcattttaccggagatgtgtgcagtaaccacgtgaccgttttctaactctacgcggaacatggtattaggcaacgtttcaagaacggtaccttgcatttcaatattgtcttctttggccatctaatcctctggggtatcactaccgtaatttgaaccggcaagataatgccgaagttctgtaaataagtaaagatttgcgcgctaaatcgcaacaaacaggttcggcacattactccgaaaacacacggctaagccgcaccaaaagcgcaacgtataagggagcggtgagataaacgatgggcgttacctgacgcgaaaaattccttatcggcagcggggtaatgagcgtaaccaactctgcgaccgcaattataacactctggggagaaatgtgccgaaaacattcattcttgtggactaaacaagcatcgtggtacccagaaattattcggcaatcgtccgaggcgcatttgattgagataattaaggtaatcccggcggggaatttcgcaggcaccaaggcttgctgtgtgatcgttaaggacctggcagtcgataagcttaccgccatgaccgataaattcctcacagaataccagaagcgccgttttagacgcattttccatccggctgaacatggactcgccacaaaatagcgttccctgggccacgccgtacataccgccgacaagctcatcttcacgccagacttcaatggagtgggcatggccgagttcgtgaaggcgatggtaggcttcgaccacgccacgcgtgatccaggttccttcttcgcgatcgctggcacagccttcaatgacctgaccaaaagcgtaattcatcgtgacacgataggggctgcgtttatgaaatcgcttcatactacggctgatatgcagactttctggccatagcaccgcgcggggatcggggctccaccagaggatggggtcgcctggagaaaaccacggaaaaataccacgctggtaagccattaacaggcgcgcagggctaagatcgcccccaagtgccagcaggccgttaggctcacgtaatgcgccttccggggaagggaaggctatactatggcgagaaagctgaaccaggcgcatgaccgcaaaactccacgcaagtcggatcgttcaataatagcttacaaaccctgcttgaactggtaataacgcccctgtctggcaagcagttctgcgtgagtaccttgctcaataatttgcccgttgtccatcactattatttgttggaaacgagagagtccgcgaagtcgatgggtgaccattaacaccgttttctcacgcatcatttctgcaagcaattcaaggatctggctttcggttgtggcatctaagccttcggtaggttcatccagcaacaccagtggcgcatcatgtaacagcgcacgggcgatagccagacggcgcagttcaccaccggagagctggcgtccgccttcacctaaccaactgttgagacctgcatcctcgagcagcttttccaggccaacgcgacgcaagatctcgctcagagcctcatcactactgccagggctggcgagtaaaagattatcacgcagcgtggcgctaaacagatgcactcgctgaggaacaacgctgatggtctgtcgtagagccgcttcattcaggctggctatggggctatcgttaagcaaaatctcgccctgttgcgggtcccatgcgcgggtcagctgttgtaacagtgtacttttgccgcatccggttcgcccgagaatcgctatatgttccccggcgtttacctgaagagaaatccctttaagtgcctgttgagattgctccggataagtgaactgaacatcccgtaacgtcaggctaacgcgatcggcaacacgagtttgggtatcaggaaaggtgacctccggtttttgatccgttaagtcagagatacgtacggcagaggcaatgacttgccccagatgctgaaatgcacccgttactggtgccagtgcttcaaacgcggctaacgcgcagaagacaaacagggcaattaacgcgccgggttgagcattgccgccaacgccgccagacgccatccacagcatcaggatcaccgctaacgcgccaatgagcagcattatcgcttggctcaatgcggtcagttcagattgacggcgttgcgcttccagccattgaatttctgtattctctagttgcgtgcgataacgatcgctggcaccaaaaatggtcagctcagcttgcccttgcagccaggccgtcagttgttggcgatactgtccgcgaagatgagtcagattttgcccggtgctttttcccgcacgataaaacagcggtggcatcaggaaaagcgtcagtaacataatgccgcccagcgtaaaggcgagggtgaaatcaaggaaacttaacccgattgtcaccaccataatcaccacaaaagcgcccaccagcgggctgataacgcgcaggtaaagatgatcgagcgtatcaacatccgccaccacgcgattgagcaattcgccctgacgatagcgcgccagtccggcaggggagaggggcagcaatttgctgaaggtgtaaatgcgcagatgctgcaacacgcggaaagtcgcgtcgtgacttaccagacgttcaaaatagcgcccggcagtacgggtgattgctgcgccacgcacgcccgcagcgggtagcatatagttgaagctgtacagtccggcaacccccgcaaccgcactggcgctgaggaaccagccggaaagtgtcaacagaccgatactggcgagcagcgtcacaattgccagcacaataccaagacttaacatccatttatgacgtttatacagtgccagatagggtagcaaagcgcgcatttaaatctcctcctgacgatgggccagtaatgtggcgaatgggccaccagccacacttaattccgcgtaacgtccttgctcaataatccggccatcctgcataacccaaatgacatcccagtcagcaagatcttctaactggtgggtgaccattaacgttgtctggcgcagagaggcggcattcagcgcctccattacgcgctgttcactgtgagcatcaaggctggcagcgggttcatccaacagtaataggctacagggatttagtaacgcacgggccaccgccacgcgctgcgcctgccccacggaaaggcgggcagcctggtcgccaacaggcgtatcaacgccttgtgggaggagcggtagaaactcgctgacccaggcgttatccagcgctgcttgtaattcttgttcgctggcatcaggtcgcgccagtagtacgttatcccgcaatgttgctgccggtaattgtgggttttgcccaacccaggagagatgtttacgccaactttctggacttaaatcgcgtaattctatcccgttgattcgtaggcttccctgataactgagaaaaccagaaagcgcgttcagcagactgcttttaccactaccgctgcgaccaaccaacaccgcacgttggcctgctggcaaagtaaagttcagcggtccggccagcgttttaccttccgggctcgtgataaacagctcctcggcctcaatggtcaccggatcggtgcttgctaattccgcctcaccacgttgcggatgggcgagcggggtttccataaacgttttcagactgtcagctgcgccaacagcctgggctttagcatgataaaacgtaccgagatcgcgtaatggctggaaaaactctggcgcaaggatcagggccagaaaacccgcagccagcgtcacaccggtatcgtagtgaccaaaatccagctcgccgagataggaaaaaccaaagtagaccgccaccagagcaatactcaggctggtaaaaaattcgagaatgccggaggataaaaacgccagccgtagcacttccattgtccgttggcggaaatcttcgctagcagaacgaatactttcaatttcagcttcaccacgaccaaaaatacgcaatgtttccatgccgcgcaggcgatcgaggaaatgcccacttaagcgagcaagagcgagaaagttacgtcggttagcatcggcagcccccattccaaccagcgccataaacaacggaattaacggtgcagtgcccagcagaatgagcgccgcagcccagttagaggggaagattgccaccacaatcagcaacggcacgctcactgccagcgccatttgcggcagatagcgtgcatagtaatcatgcatatcgtcaatttgctcgagtaccagcgtcgcccagctccccgcaggtttaccctgaatccacgctggccctgcttgttgcagacggtcgagaacctgacggcggatggcaaagcggatatgctgcccggcgtgataacccacccgttcgcgtaaccagaccacccatgcgcgcagtacaaaggtcagaaccagtaacgtaaagggaagcagcagggcttcacggggaatattctccataatcatatgttgcagaattcgcgccatgaaccaggcctgggcaatgatcaatatgccgctcacaaagcccagcagacgagaaatattcagccaacgttgggagatgacgctttgctgttttaaccagcgggttaactctttttgacgagatttattcattgcacgcttagcaggtgagttatcagaattatttgcagagcaatgttacaacggggaaaaaataaaggcgacccatagtcgcatggtgtcgccttctttacttttgttactgatttgtaaaattattttgcgtcagctaaaccatcgaggtagcgttccgcatcaagtgctgccatgcagcctgtaccggcgctagtaatggcctggcgataaatgtgatccatcacgtcgcctgcggcaaagacgccaggaatgctggtctgggtggcattaccatgaataccgctctgtactttgatgtagccgttttccagttccagctgcccttcgaaaatcgcagtattcgggctgtgaccgatagcaacaaacagaccggcaacgtcgagactctcgatgttatcgctgttttgcgtatcgcgcagacgaacgccagtgacacccatttgatcgccggtcacttcttccagcgtacggttggtgtgcagaatgatgttgccgttctccactttatccatcaggcgcttaatgaggattttttccgcgcggaaaccgtcacggcggtgaatcagatgcacttcgctagcgatgttagacagatacagcgcctcttcaaccgcggtattgccgccgccgatgaccgcaactttctggttgcgatagaagaaaccgtcgcaggttgcacaagcagaaaccccacggcctttaaaggcttcttcagagggcaggccgagatagcgtgcagaagctccggtggcaataatcagcgcgtcgcaagtgtattcgccgttatcgccattcagacggaacggacggttttgcagatccaccttgttgatatgatcaaaaatgatctcagtttcaaacttggtggcatgttcgtgcatgcgctccattaataacggaccggtcagatcgtttggatcgccaggccagttttccacttccgtggtggtggtcagttggccgcctttttccatgccggtaatcagcacaggttgcaggttggcgcgcgccgcgtagacagcagcggtgtatcccgccgggccactacccaggataagcagtttactgtgtttggtcgtgcccatgagatccccatagttgttggcagacaatgggcaggattgtagggaatttacagacgtaaaaaaagagtatgacgattttgttaacaatttgtgcaatcggcagcatcgataagcaggtcaaattctcccgtcattatcacctctgctacttaaatttcccgctttataagccgattaaatgatgaataaacgcccctgttaatgaatatctggcatgttgtactaaaaatcgatgttttgctttgacaatcccctggtgttttgcgaaaacattcgaggaagaaaaaaaacagtattcttatatgcgcataaccatgcatgtaaataccatgtttaccgtgctagtgaaatctacgtatggcgtggacagacgccattcgtgatgtcgatagctgccacaaggcaacggtcttctcaccgtagacccaggcattgcgcgccgtgaatcttcatgatttcggtctatcgtgacgggtagcgactctgaacagtgatgtttcagggtcagacaggagtagggaaggaatacagagagacaataataatggtagatagcaagaagcgccctggcaaagatctcgaccgtatcgatcgtaacattcttaatgagttgcaaaaggatgggcgtatttctaacgtcgagctttctaaacgtgtgggactttccccaacgccgtgccttgagcgtgtgcgtcggctggaaagacaagggtttattcagggctatacggcgctgcttaacccccattatctggatgcaagtcttctggtattcgttgagattactctgaatcgtggcgcaccggatgtgtttgaacaattcaataccgctgtacaaaaacttgaagaaattcaggagtgtcatttagtatccggtgatttcgactacctgttgaaaacacgcgtgccggatatgagtgcctaccgtaagttgctgggggaaaccctgctgcgtctgcctggcgtcaatgacacacggacatacgttgttatggaagaagtcaagcagagtaatcgtctggttattaagacgcgctaacacggaacaggtgcaaaatcggcgtattttgattacactcctgttaatccatacagcaacagtactggggtaacctggtactgttgtccgttttagcatcgggcaggaaaagcctgtaacctggagagcctttcttgagccaggaatacattgaagacaaagaagtcacattgacaaagttaagtagcggccgccgccttctggaggcgttgctgatccttattgtcctgtttgccgtctggttgatggctgccttactaagctttaaccctagcgaccccagctggagccaaacggcctggcatgaacctatccataatttaggtgggatgcccggtgcgtggttggcagatacgctgttctttatttttggcgtgatggcttacaccattcccgtcattattgtcggcggttgttggtttgcctggcgtcatcagtccagcgacgaatacattgattattttgccgttagcctacgcatcattggcgttttggcgctcatccttacctcctgtggtctggcggcaatcaacgctgacgatatctggtattttgcctccggtggcgtcattggcagcttactaagcactacgctacaaccactgctacacagtagcgggggaactattgcgctgctctgcgtttgggcagcgggcctgacgttgttcaccggttggagttgggtgaccattgctgaaaaactcggcggctggattttaaacattctcaccttcgccagtaatcgtacccgtcgcgatgatacctgggtcgatgaagatgagtatgaagacgacgaagagtatgaagatgaaaatcacggcaaacagcatgaaagtcgccgtgcccgtattcttcgcggcgcgctagcgcgtcgtaaacggttggcggaaaaattcattaatccgatggggcggcaaacagacgctgcgttgttctccggtaagcggatggatgatgacgaagagattacctacactgcacgcggtgtggctgccgacccggacgacgtcctatttagcggcaatcgtgcaacgcagccagaatatgacgaatacgatccattattaaacggtgcgccaattaccgaacctgtcgctgtagcagctgctgctaccacggcgacacaaagctgggctgcgccggttgaacctgtgactcagacgccgcctgttgcctctgttgatgttccacctgcgcaacctacagtagcctggcagcctgtaccgggtccacaaacgggagagccggttattgctcctgcaccggaaggttacccacagcagagtcaatatgcgcagcctgcagtgcaatataatgagccgctgcaacaaccagtacagccgcagcagccgtattatgcacctgcagctgaacaacctgcgcaacagccgtattatgcccctgcgccagaacaaccggtggcaggtaacgcctggcaagccgaagagcagcaatccacttttgctccacagtctacataccagactgagcaaacttatcagcagccagccgctcaggagccgttgtaccaacagccgcaacccgttgaacagcagcctgttgtggagcctgaacccgttgtagaagagacaaaacccgcgcgtccgccgctttactactttgaagaagttgaagagaagcgagcccgtgaacgtgaacaacttgcggcctggtatcaaccgattccagaaccggttaaagaaccagaaccgatcaaatctagcctgaaagcaccttctgttgcagcagtacctccagtagaagccgctgccgctgtttccccgctggcatctggcgtgaaaaaagcgacactggcgacgggggctgccgcaaccgttgccgcgccagtcttcagtctggcaaatagcggtggaccgcgtcctcaggtcaaagaggggattggtccgcagttgccacgaccgaaacgtatccgcgtgccaactcgtcgtgaactggcgtcttacggtattaagctgcccagtcagcgtgcggcggaagaaaaagcccgtgaagcccagcgcaatcagtacgattctggcgatcagtacaacgatgatgaaatcgatgcgatgcagcaggatgaactggcacgtcagttcgcccagacacagcagcaacgctatggcgaacagtatcaacatgatgtgcccgtaaacgcagaagatgcagatgctgcggcagaggctgaactggctcgtcagtttgcgcaaactcaacaacaacgttattccggcgaacaaccggctggggcgaatccgttcagcctggatgattttgaatttagcccaatgaaagcgttgctggatgatggtccacacgaaccgttgtttacgccaattgttgaacctgtacagcagccgcaacaaccggttgcaccgcagcagcaatatcagcagccgcaacaaccagttccgccgcagccgcagtatcagcagccacaacagccggttgcgccgcagccacaatatcagcagccgcaacaaccggttgcgccacagcagcaatatcagcagccgcaacaaccggttgcgccgcagcagcagtatcagcagccacaacagccagttgcgccacaaccgcaggataccctgcttcatccgctgttgatgcgtaatggcgacagccgtccgttgcataaaccgacgacgccgctgccttctctggatttgctgacaccgccgccgagcgaagtggagccggtagatacctttgcgcttgaacaaatggctcgcctggtggaagcgcgtctggctgatttccgtattaaagccgatgtcgtcaattactctccggggccggttatcactcgctttgaattgaacctggcaccgggcgtaaaagcggcgcgcatttctaacttgagtcgggaccttgcccgtagtcttagcacggtggcggtgcgtgtcgttgaagttattcctggcaaaccctatgtaggtctggagttaccgaataaaaaacgacaaaccgtttatctgcgcgaagttttggataacgccaaattccgcgataatccgagcccattaaccgtggtgctgggtaaagatatcgccggtgagccggtggttgccgatctggcgaaaatgccgcacttgttggttgcggggactaccggttccggtaaatctgtcggtgtgaacgcgatgatcctgagcatgctttataaagcacagccagaagatgtgcgtttcatcatgatcgacccgaaaatgctggagcttagcgtttatgaaggcattccgcatctgttaacggaagtcgttactgatatgaaagatgccgccaacgcgctgcgctggtgtgttaacgagatggagcgtcggtataaactgatgtctgcgctgggtgtgcgtaatctggcgggttataacgaaaaaattgctgaagccgatcgcatgatgcgtccgattccagacccgtactggaagccgggtgacagtatggatgcccagcatccggtgctgaaaaaagaaccatacattgtggtgttggttgacgaatttgccgacctgatgatgacggtaggtaaaaaagtggaagagctgatagcacgtctggcgcaaaaagcccgtgccgcgggtatccacctcgtactggcaactcagcgtccaagcgttgatgttattactggtctgattaaagcgaatattccgacccgtatcgcctttaccgtatccagtaagattgacagtcgtaccattcttgatcaggctggcgcggaaagtctgctgggtatgggggatatgctctactctgggccgaactccacgttgccggtacgtgtccatggtgcttttgttcgcgatcaggaagttcatgccgtggtgcaggactggaaagcgcgtggtcgcccacagtatgttgatggcatcacctccgacagcgaaagcgaaggtggtgcgggtggtttcgatggcgctgaagaactggatccgttgttcgatcaggcggtgcagtttgtcactgaaaaacgcaaagcgagtatttctggcgtacagcgtcagttccgcattggttataaccgtgcagcgcgtattatcgaacagatggaagcgcaggggattgtcagcgaacaggggcacaacggtaatcgtgaagtgctggccccaccgccgtttgactaactaatgcatcgtatgccggataaggcgcggtagcgtcgcatccggcactctatcaactgaaaattcagtattttcttctttcctcaagctgattattagcctggaatagagagtagagggaactcccgatcgggagtgacgtaatttgaggaataatgatgaaaaaaattgccatcacctgtgcattactcagtagcttagtagcaagcagcgtttgggctgatgccgcaagcgatctgaaaagccgcctggataaagtcagcagcttccacgccagcttcacacaaaaagtgactgacggtagcggcgcggcggtgcaggaaggtcagggcgatctgtgggtgaaacgtccaaacttattcaactggcatatgacacaacctgatgaaagcattctggtttctgacggtaaaacactgtggttctataacccgttcgttgagcaagctacggcaacctggctgaaagatgccaccggtaatacgccgtttatgctgattgcccgcaaccagtccagcgactggcagcagtacaatatcaaacagaatggcgatgactttgtcctgacgccgaaagccagcaatggcaatctgaagcagttcaccattaacgtgggacgtgatggcacaatccatcagtttagcgcggtggagcaggacgatcagcgcagcagttatcaactgaaatcccagcaaaatggggctgtggatgcagcgaaatttaccttcaccccgccgcaaggcgtcacggtagatgatcaacgtaagtaaaggcacctgagtgagcaatctgagcctcgattttagcgataatacttttcaacctctggccgcgcgtatgcggccagaaaatttagcacagtatatcggccagcaacatttgctggctgcggggaagccgttgccgcgcgctatcgaagccgggcatttacattctatgatcctctgggggccgccgggtaccggcaaaacaactctcgctgaagtgattgcccgctatgcgaacgctgatgtggaacgtatttctgccgtcacctctggcgtgaaagagattcgcgaggcgatcgagcgcgcccggcaaaaccgcaatgcaggtcgccgcactattctttttgttgacgaagttcaccgtttcaacaaaagccagcaggatgcatttctgccacatattgaagacggcaccatcacttttattggcgcaaccactgaaaacccgagctttgagcttaatagcgcactgctttcccgtgcccgtgtctatctgttgaaatccctgagtacagaggatattgagcaagtactaactcaggcgatggaagacaaaacccgtggctatggtggtcaggatattgttctgccagatgaaacacgacgcgccattgctgaactggtgaatggcgacgcgcgccgggcgttaaatacgctggaaatgatggcggatatggccgaagtcgatgatagcggtaagcgggtcctgaagcctgaattactgaccgaaatcgccggtgaacgtagcgcccgctttgataacaaaggcgatcgcttttacgatctgatttccgcactgcataagagcgtacgtggtagcgcacccgatgcggcgctgtactggtatgcgcgaattattaccgctggtggcgatccgttatatgtcgcgcgtcgctgtctggcgattgcgtctgaagacgtcggtaatgccgatccacgggcgatgcaggtggcaattgcggcctgggattgctttactcgcgttggcccggcggaaggtgaacgcgccattgctcaggcgattgtttacctggcctgcgcgccaaaaagcaacgctgtctacactgcgtttaaagccgcgctggccgatgctcgcgaacgcccggattatgacgtgccggttcatttgcgtaatgcgccgacgaaattaatgaaggaaatgggctacgggcaggaatatcgttacgctcatgatgaagcaaacgcttatgctgccggtgaggtttacttcccgccggaaatagcacaaacacgctattatttcccgacaaacaggggccttgaaggcaagattggcgaaaagctcgcctggctggctgaacaggatcaaaatagccccataaaacgctaccgttaatgttatcgttgcggtaatgttgttactgtatccctgtggtcgcaggctgtggccacatctcccatttaattcgataagcacaggataagcatgctcgatcccaatctgctgcgtaatgagccagacgcagtcgctgaaaaactggcacgccggggctttaagctggatgtagataagctgggcgctcttgaagagcgtcgtaaagtattgcaggtcaaaacggaaaacctgcaagcggagcgtaactcccgaagcaaatccattggccaggcgaaagcgcgcggggaagatatcgagcctttacgtctggaagtgaacaaactgggcgaagagctggatgcagcaaaagccgagctggatgctttacaggctgaaattcgcgatatcgcgctgaccatccctaacctgcctgcagatgaagtgccggtaggtaaagacgaaaatgacaacgttgaagtcagccgctggggtaccccgcgtgagtttgactttgaagttcgtgaccacgtgacgctgggtgaaatgcactctggcctcgactttgcagctgcagttaagctgactggttcccgctttgtggtaatgaaagggcagattgctcgcatgcaccgcgcactgagccagtttatgctggatctgcataccgaacagcatggctacagtgagaactatgttccgtacctggttaaccaggacacgctgtacggtacgggtcaactgccgaaatttgctggcgatctgttccatactcgtccgctggaagaagaagcagacaccagtaactatgcgctgatcccaacggcagaagttccgctgactaacctggtgcgcggtgaaatcatcgatgaagatgatctgccaattaagatgaccgcccacaccccatgcttccgttctgaagccggtagttatggtcgtgacacccgtggtctgatccgtatgcaccagttcgacaaagttgaaatggtgcagatcgtgcgcccagaagacagtatggcggcgctggaagagatgactggtcatgcagaaaaagtcctgcagttgctgggcctgccgtaccgtaaaatcatcctttgcactggcgacatgggctttggcgcttgcaaaacttacgacctggaagtatggatcccggcacagaacacctaccgtgagatctcttcctgctccaacgtttgggatttccaggcacgtcgtatgcaggcacgttgccgcagcaagagcgacaagaaaacccgtctggttcataccctgaacggttctggtctggctgttggtcgtacgctggttgcagtaatggaaaactatcagcaggctgatggtcgtattgaagtaccagaagttctgcgtccgtatatgaacggactggaatatattggctaatacccaatttttctgaatctaaaaagcgcctgcgggcgctttttttgtctccctttgataccgaacaataattactcctcacttacacgtaatactactttcgagtgaaaatctacctatctctttgattttcaaattattcgatgtatacaagcctatatagcgaactgctatagaaataattacacaatacggtttgttactggaatcaatcgtgagcaagcttgagtgagccattatgaaaacgaaaatccctgatgcggtattggctgctgaggtgagtcgccgtggtttggtaaaaacgacagcgatcggcggcctggcaatggccagcagcgcattaacattaccttttagtcggattgcgcacgctgtcgatagcgccattccaacaaaaagtgacgaaaaggttatctggagcgcctgtacagttaactgtggtagtcgctgcccgctacgtatgcacgtcgtggacggtgaaatcaaatatgtcgaaacggacaataccggcgatgacaattacgacggcctgcaccaggttcgcgcctgcctgcgtgggcgttccatgcgtcgccgtgtctacaatccggaccgcctgaaatatccgatgaaacgagtcggggcgcgcggtgaaggcaaattcgagcgcattagctgggaagaagcctacgacatcatcgcgaccaatatgcagcgcctgatcaaagagtacggcaacgagtctatctatctgaactatggcaccggtacgctgggcggcaccatgacccgctcctggccgccgggaaataccctggtcgcgcggctgatgaactgctgcggcggctatctgaaccattacggcgactactcctccgcgcaaattgcggaaggtttgaactatacctacggcggctgggcagatggcaacagcccgagcgatatcgaaaacagtaagctggtagtgctgtttggtaataaccctggcgaaacgcgaatgagtggcggtggggtgacttactatcttgaacaggcacgccagaaatctaatgcccgcatgatcatcatcgatccgcgctataccgacaccggtgccgggcgcgaagatgagtggatccctattcgtccgggaacagatgccgcactggttaacggtctggcgtacgtcatgatcactgaaaacctggtggatcaggcattcctcgataaatattgcgttggctacgatgagaaaaccctgccagccagtgcgccgaaaaatggccactataaagcttatattctgggtgaagggccagatggcgtggctaaaacgccggaatgggccagccaaatcactggtgttccggcagacaaaatcatcaaattggctcgtgaaatcggtagtaccaaaccggcgtttatcagccagggatggggcccgcagcgtcacgctaacggtgaaatcgcaacccgtgctatcagcatgctggcgattctgaccggtaacgttggtattaacggaggcaacagcggcgcgcgtgaaggtagttacagcttaccgtttgtccgtatgccgaccttggaaaacccgatccagaccagcattagcatgtttatgtggaccgatgccattgaacgtggcccggaaatgacggcgctgcgtgatggtgtacgcgggaaagataagctggatgtgccgatcaaaatgatctggaactatgccggtaactgcctgattaaccagcattctgaaatcaaccgtacccatgaaatccttcaggatgataagaagtgcgagctgattgtggttatcgactgccacatgaccagtagcgcgaaatatgctgacatcctgctgcctgactgcaccgcttccgaacagatggactttgcgctggatgcatcctgcgggaatatgtcttacgtgattttcaacgatcaggtgattaaaccgcgctttgaatgtaagaccatctatgaaatgaccagcgaactggcaaaacgtcttggcgttgagcaacagtttactgaaggccgtacccaggaagagtggatgcggcatctgtatgcccagagccgggaagcgattcctgaactgccaacgtttgaagagttccgcaagcaggggatctttaaaaagcgcgacccacaagggcatcacgttgcttataaagccttccgtgaagatccgcaggcaaacccactgactacgccaagcggcaaaattgagatttatagccaggcgctggctgacattgccgctacctgggaattgcctgaaggcgatgtgatcgatccactgccgatctacacgccgggctttgaaagttatcaggatccgctgaacaaacagtatccgctgcagcttacaggtttccactataaatctcgcgttcacagtacttacggcaacgttgatgtgctgaaagcggcttgccgtcaggaaatgtggatcaacccgcttgatgcccaaaaacgcggtatccacaacggcgataaagtcaggatctttaacgatcgtggtgaggttcatattgaggcgaaagtgacgccacgaatgatgccgggtgtggtcgcactgggtgaaggtgcctggtatgacccggatgcaaaacgtgtcgataagggtggttgtattaacgtactgaccactcaacgtccgtctcctctcgctaaggggaatccgagtcatacaaaccttgttcaggttgaaaaggtgtaaggagtaaccgatgacaacccagtatggattttttattgattccagccgttgcaccggttgcaaaacctgcgagctggcctgtaaagactacaaagatttgacgccagaagtcagcttccgccgcatttatgaatatgctggcggcgactggcaggaagataacggtgtctggcaccagaacgtgtttgcctactatctgagcattagttgtaaccactgcgaagatccggcttgtactaaagtctgcccgagcggtgcgatgcataaacgtgaagatggttttgttgtggtcgatgaagatgtgtgcattggctgccgctactgccatatggcttgcccgtatggcgcaccgcaatataacgaaacgaaaggccatatgaccaaatgcgatggttgttatgaccgtgttgcggagggtaaaaagccgatctgtgttgaatcttgtccgctgcgggcgctggatttcggccctatcgacgagctgcgtaaaaaacatggcgatctggcggccgttgcgccgttgccgcgagctcactttaccaaaccgaatattgtgatcaaacccaatgccaatagccgcccgaccggggataccactggctatctggcaaacccgaaggaggtgtgagatgggaagtggatggcatgaatggccgctgatgatcttcacggtcttcgggcaatgtgtagcaggtggttttatcgttctggctttggcgctgctcaaaggcgacctgcgagcagaagcccagcagcgtgttatcgcctgcatgtttggtttatgggtgctgatgggcattggctttatcgcctctatgctccatcttggtagtccaatgcgcgcttttaacagcctcaaccgggtaggggctagtgcactcagtaacgaaatcgccagcggtagcatcttttttgccgtaggcggcatcggctggttgctggcaatgctgaaaaagctgagtccggcattgcgtacgctgtggctgatagtgacgatggttcttggcgtcatctttgtctggatgatggtgcgtgtgtataacagcattgataccgttccgacctggtacagcatctggacgccgatgggcttcttcctgacgatgtttatgggcggcccgttactgggttacctgttgttgagtctggctggcgtcgatggctgggcgatgcgtctgctgccagcaatttctgtactggcactggtagtgagtggcgtggtgagtgtgatgcagggcgcagagctggcgactattcatagttctgtgcagcaggccgcagcgctggtgccggactatggtgcgctgatgtcctggcggatcgtgcttttggccgttgccctgtgcttgtggattgcaccacagctaaaaggttatcagcctgcggttccgctactttctgtaagtttcattctgcttctggcaggggaattaatcggtcgcggcgtattctatggtttgcatatgaccgtggggatggccgtcgcaagctaatcataacaaccggggtttcggccccggttctcttttatttctgcttcgttaacgtgtcataactggtcatcaaattacgataatcaggaatgtggttagagaacaacgtcgccagtccttcaatatcattacgccagtcgcgatgcagctcgcacgccacgccgaaccatgtcatcaattgcgcaccagcttggctcaagcgatcccatgcgctatgccgggtaatttcattaaaggtcccactcgcgtcagtcacgacaaagacgtcaaacccttcttcaatggcactaagcgccgggaatgccacgcaaacttcggttaccacaccggcaataattaactgttttttacctgtcgctttgacagcttttacaaaatcttcgttatcccaggcgttaatatttcccgggcgagcaatgtaaggtgtatcggggaattgtgctttcagttctggaactaatgggccgttaggaccggtttcaaaactggtggtaagaatagttggtaagttgaaatacttagccaggtcacccagcgccagcacgttatttttaaacttatcgggttcgatatcccgtacaagggaaagtaaaccagcctggtgatcaacaagcaaaacggcagcatcatttttatcaagacgaacatacggtttggtcatcctcttctcctttcgagagtcagtggtacgtctgaaatcgatcagacgcgatgcattgctctgaaagcatagacgggaaatatgagtttgctgtgaccatgaaatttttcgactgaacgaagcgtatgaaatttgtgttagttcaataaaaacaatcagatgagactaatcatctcttcagcattagcgttatgaatgagtaatataaatcgataataccgccgctgggatatcgcgtattttcacccattgacaatgtttttggcggtggcatgatgcgcatgaaatttgaacttcctcacggttttaattcatgtccacgtatacccagcctgtcatgcttttgctgtctggcctgcttttgttgactctggcgattgcggtgttaaatacactcgtgccgctttggctcgcccaggaacacatgtccacatggcaggtaggcgttgtcagcagttcctattttaccggcaaccttgtcggtacattgctgacagggtatgtcattaagcgcattggctttaaccgcagctattatctggcctccttcatttttgccgctggctgtgccggccttggcctgatgattggattctggagctggttggcttggcgttttgtcgcgggcgtcggctgtgccatgatttgggtggttgttgagagcgcgctgatgtgcagtgggacgagtcgtaaccgtgggcgtttgcttgctgcgtatatgatggtttattacgtgggaacgtttttaggccagttactggtcagcaaagttagtaccgagctgatgtccgtattgccgtgggttacaggtttgacgttggcagggatcttaccgctgttgtttacgcgtgtgctgaatcagcaggctgaaaaccatgatagcacgagtattacgagtatgctaaaactccgtcaggcgcggcttggcgtgaatggctgcattatcagtggaatcgttctgggatctctatatggcctgatgccgctgtacctcaatcacaaaggggtgagcaatgccagcattggtttctggatggcggtactggtcagtgcgggtatccttggacaatggccgattggacgtctggcggataagtttggtcgactgctggtgttgcgtgttcaggtctttgtcgtcattctcggcagtatcgcgatgcttagccaggcggcgatggccccagcgttattcatcctcggtgccgctggctttacgctatatccggtggcgatggcatgggcttgcgagaaagttgaacatcatcaactggtggcgatgaaccaggccttactgttgagctatactgtgggaagtctgcttggcccgagttttaccgctatgctaatgcagaatttctccgataatttattgtttatcatgatcgccagcgtaagctttatctatttgctgatgctgctgcgcaacgccggtcatacgccgaaacccgttgctcacgtgtaaatgaattcaagcagagtgtgaacttactgtttcacactctgcttttttgtttcttctatctgacttgctttattccaaattttattcgtttaaaaataaaatgtgcagcaggttataattttgcatttcgctatttccgcacttcttatttgccgcgcataatccctcgttttaccgatgcccctttaattttggcgaaggatttgtctatggctgggaatgttcaggaaaaacagttgcgatggtacaacattgcgctgatgtcttttatcactgtctggggttttggcaacgttgttaataactatgccaaccaggggctggtggttgtttttagttgggtgtttatctttgcactctatttcacaccttatgcgctaattgttggtcagttaggcagcaccttcaaagatgggaagggcggggtcagtacctggattaaacacacgatgggacccggactggcttatctcgccgcgtggacctactgggtggtgcatattccctatctggcacaaaaaccccaggcaattctgattgcgctcggttgggcgatgaaaggcgacggtagcctaatcaaagaatatagtgtcgtagcgttacaggggttaacgctggtgctgtttatcttctttatgtgggttgctagtcgcggtatgaaaagcctgaaaatcgtcggttctgtggcagggattgctatgtttgttatgagtctcctgtatgtggcgatggcggtaaccgcgcctgcaattactgaagtgcatattgcgaccacaaacattacctgggaaacgttcattcctcatatcgactttacctacattaccactattagtatgctggttttcgcggttggcggagcagagaagatttctccttacgttaatcaaacgcgcaacccaggaaaagaatttccaaaagggatgttatgcctggcggtgatggttgcggtttgtgccattctgggcagcctggcgatggggatgatgtttgatagccgtaatatcccggatgacttaatgaccaacggtcagtattacgcctttcagaagctgggcgagtattacaacatgggtaatactttaatggtgatttacgccattgcgaataccctgggacaagtagcggcgctggtattcagcattgatgccccgcttaaagtgctattaggtgatgctgacagcaaatatattccagccagtttatgtcgtaccaacgcttctggtacgcccgttaatggctattttctgaccctggtactggtggcgattctgattatgctgccgactctcggcattggtgatatgaacaatctctataaatggctgttgaaccttaatagcgtagtgatgccgctgcgttatttatgggtatttgttgcatttattgcagtcgttcgcttggcgcagaaatataaaccagaatatgtctttattcgtaataagcctctggcaatgaccgtcgggatttggtgttttgcctttaccgcctttgcctgtttgacggggatcttcccgaaaatggaagccttcactgcagagtggaccttccagttggcgctgaatgttgcaacgccgtttgtgctggtaggattaggactgatattcccgctgctggcgcgtaaagcgaatagtaaataattattgtggtcggtgacgctgactctggcagatctgacccgtttttacataatcgagaaatgcgcgcaagccgcaggacatatactggcggtttggataatagatctggaagcctggacgctctgtgctccagtcttccagtacacattctaaacgaccagtatcaaggtactccttgatctgttcatagagcagatacccgataccagcacccatcaaaacggcctccagttcagcatcaacatcatccagaatgatatttcctgcgacagcaatttccagctcctttgcaaattgccagtggaaaggtttgccgctgggataacgaaaaacaacacattgatgattaagcagatcatgaggatggcggggtttgccatatcttgcaaagtactctggcgttgctgctacacataatttcactggcgggccgatcgccacgctgatcatatctttttcgacgatgcaactaagtcgaacgccagcgtcaaagccctgttggacgatatcgacaagagagtcgtcagttgtgagctcgactttaatatcaggatattcacgtgtgaaaccaaccagtaaagacattaaaaatatacgtgcagctacccgggcggcattgattttgagcgttcctgtcggtgtcagacgaaaatcattcatctcatctaacatgatctgaatttcgtcgaaagctgggcgcaatcgttcatagagattagaacccgcttccgttaagcttacgcttcgggttgtccgattgaataagcgaattttaagacgttgttccagtgttttaatactatggctaatggcggagctggataagcctaactcatcgcccgctgcacgaaagctttgattacgggccacggcaaagaaagtggcaaagtcagacatattcatccgcattagtgaaaatccttcattaactcatcctgaatcatcacgtttacaggattatgccgcctgcgtaaagtgcgctccagaacttaacgtggaggtaaaattatgcagtctgaacgtatttatttggtatgggcccatcctcgtcatgatagtttgaccgcacatattgctgatgcgatccatcagcgggcaatggagcggaaaatacaggtgacggaactcgatttatatcggcgtaatttcaacccagtgatgacgccggaagatgaaccagactggaagaatatggataaacgttattctccagaggttcatcagctttatagtgagctgcttgaacatgacacgttagtggtggtttttcctctctggtggtacagcttcccggcaatgctaaaaggatatattgacagagtatggaataatgggctggcttatggagatgggcacaaattaccattcaataaagttcgttgggtggcgctggttggaggagacaaagaaagttttgtccagatgggctgggaaaaaaatataagcgattatttaaaaaatatgtgcagttatcttggtattgaagatgccgatgtcactttcttgtgtaatacagtggtattcgatggggaagaacttcacgcgagctattatcagagcttattatctcaggtacgggatatggtagatgcactataagatgtgttaaaaacgctgtagcagaatgaagcgcggaataaaaaagcggcaactcaataaagttgccgctttacggggaaattagaacattaccttatgaccgtactgctcaagaatgcctttcacgcgttccatggtctctttcttcggtggtttaacaccgtcgagtttgtactcttcacccattgccacccatttgtgtttgcccagctcgtggtaggggagaagctcgattttctcaacgttgcccatatcacgggtaaattcaccgaggcgatgcgcactatcgtcatcgtcagaccagcctgggacaacaacgtagcggatccacaccttcacatttttgttcgccagatatttagcgaactccagcgtgcggtggttggaaactccaaccagattttggtggatctcgtcgttcatctgtttgagatcgagcattaccaggtcggttacttccagcagttcatcaatcaccggatcgtaacgacgaacaaaaccgttggtgtccagacaggtatgaatgccttcttttttgcaggcgcggaaccagtcacgaacaaactcagcttgcaggattgcttcaccgccggatgcggtaacgccgccgccggaagcgttcataaagtggcgataggtcaccacttccttcatcaaatcttcaacggtaacttctttaccgccatgcgtgtcccaggtgtcgcggttatgacaatacaggcagcgcatcaggcagccctggaaaaaggtgataaagcgaatacctgggccgtctacggttccacaggattcaaaggagtgaatgcgaccaataacactcattgcggtgtttctccagatgtggcccatctgaggccgtgttggtgcgcagctcgaaggctacgtcgagtctgttttggcagtcaccttaaagtatagatagctgacaaaaaaggctctcgcgctaaaaaaggccccactttcgtggagcctttattgtacgctttttactgtacgatttcagtcaaatctaattacatagattgagtgaaggtacgagtaataacgtcctgctgctgttctttagtcaggctgttgaaacgtactgcgtagccagatacacggatggtcagctgcggatatttttccgggttttccatcgcgtcgagcagcatttcacggttcatcacgttaacgttcaggtgctgaccaccttcgatggatgcttcgtggtggaagtaaccatccatcagaccagccaggttggtcttacgaacttcgtcgtctttacccagtgcgttcggaacgatagagaaggtgtaggagataccatctttagcgtaagcaaacggcagtttagcaacggaagtcagagaggctactgcacctttctggtcacgaccgtgcatcgggttagcacccggtccgaacggcgcgccagcacgacgaccgtctggggtgttacccgttttcttaccatacacaacgttagaagtgatggtcagaacagactgagtcgggatagcgtcacggtaggtgtgcagtttctgaattttcttcatgaaacgttctaccaggtcaacagccaggtcatctacacgcggatcattgttaccaaactgcgggtattcgccttcgatttcgaagtcgatagccagaccgtcttcgtcacgaatcggtttaactttcgcatatttgattgcagacagggagtcagcagcaacggacagaccagcgataccacacgccatggtgcggataacgtcacggtcgtgcagcgccatcagagaggcttcgtagctgtacttgtcgtgcatgtagtggatgatgttcagtgcagtgatgtactgtttagccagccagtccatgaagtgatccatgcgctccatcacttcatcatagttcaggacatcgcctttgatcggttcagacttcggaccaacctgcattttcagtttttcgtcaacgccgccgttgattgcgtacagcatggttttcgccaggtttgcacgcgcaccgaagaactgcatttgtttaccaacgatcatcgggcttacgcagcaagcaatagcgtagtcatcgttgttgaagtccggacgcatcaggtcatcgttctcatactgcagagaagaggtgtcgatggacactttagcggcgaatttcttgaagttcagcggcagtttttcagaccacagaatggtcatgttcggttccggagacggacccatggtgtacagggtgttcaggaaacggaagctgtttttggtaaccagggtacgaccgtcgaggcccataccaccgatagattcggttgcccagatcgggtcgccagagaacagttcatcgtattccggagtacgcaggaagcgaaccatacgcagtttcatgaccaggtggtcaaccatttcctgcgcttcttgttcggtgatcttgccagctttcaggtcacgttcgatgtacacatccaggaaggtggaggtacgaccgaaggacattgcagcaccgttctgagacttaacagcagccaggtagccgaagtaagtccactggatagcttcctgagcgttggtagccggaccagagatgtcgtagccgtatttcgcagccatttctttcatctgacccagagcgcggtgctgttcagcgatttcttcgcgcagacggatagtctgttccaggtttacgccgttttccagatcagcctgcagagaagtgaactgtgccagtttgtctttcatcaggtagtcgataccgtacagcgcaacgcgacggtagtcaccgatgatacggccacggccatatgcatctggcagaccggtcagaacaccagatttacggcaacgcaggatgtccggagtgtaaacgtcgaacacgccctggttgtgagttttacggtattcagtgaagatttttttgatcatcggatccagttcgcggttgtacgctttgcaggaaccttcgatcattttgataccaccgaacgggataagagcacgtttcagcggagcttcagtctgcagaccaacgattttctcaagctgcttgttgatgtagccagcgtcgtgagaggtgatggtggaagcaacagcggtgtcaaagtcaactggcgcgtgagtgcggttttccagtttaacgccttccattactttgtcccacagggtggtggtcgcttcagtagcgccagccaggaaggactcgtcaccctcgtacggagtgtagtttttctgaatgaagtcacggacgtttacttcattctgccagtcacctttggtaaaaccttcccaggctgtggctaacttttcattaagctcggacatgtaacacctaccttcttaagtggattttttatttactgcgtacttcgacaaccattaatggtggtcgttttcacgcaggtaaatgacccagtatgtcaacccaaccaacaaaccaccaccgataatgttgccgatcgtaaccggaatcaggttatcagtgatgaaattcatcacggtcaggtgagaaaaattttccggtgcagaaccgactgcggtccaaaattccggggatgcgaagtcgcggattacaatacccatcgggatcataaacatgtttgcgatactgtgctcaaaaccgctggcaacaaacatcgcgaccggcagcaccataatgaacgctttgtccatcaggctgcggccagaataactcatccatactgccagacataccatcaggtttgccaggataccaagacagacggcctcaataaaagtatggtgcactttgtggtcggcggtttgtaggacgtttagtccccattgaccatttgcggtcatatactcgccggaaagccacattaaaagtacaaacagcagtgcgccgaccaggttgccaaaatagacatttagccagtttttcgccaactgaccccaggtgatgcgcccactcgccttagcaacaacaatcaacacggtggaagtaaagagatcggctccgcagacaacacaaagaatcagccccagagagaagcaaatgccgccaaccagttttgccatgccgaagggcattgtgcctgtgccagtggttgctgtgatatagaagacgaatgcgatactgatgaaaacaccggcggtaatcgccagatagaaagtcttaagcggatgtttcgttgctttatagacacccgcctcttcggccactttggccattgcagcaggaagtaaaagatcaaaagggttgtcagctttcacactaactctctctttattaagtcggcgacgagatactaacaaagcattatagatgagaaattgatatagatcatatctcgcctggcttataggcccgtaactcgcatggtttttatgcaaatacggagtaaatatttgattatccaaataaaaataaattttaaaaattaacaaatgagttgaattttttccgcatcctccgctaaaacagttaattaaaagggagcatcaggcgaataaagtaacaatatcgatcgtatttattaaatacaaattaccgatatttaaccttataattacaattattttattaatgcaaatatatgtaaagcggggcattaaaaaaacgccccgtaatataactcagactaatcattaagcctacattgcgtaggctatttgattttattttgcccagaatgctgctttggcgcgctgcagcttttcgtaggccttcaacaagctctgatgtgcagcaaacgcgtgcagatcgctatctaccggttgcaggccgtaaaacgccgcttcgccgctcattgccgcactggcggcttctacggcatctgcgccgtacatgcgaacaaacgcattcagatattgcagcggctggcgatcttcttcctgtgccagtaataacaacgtttgcaggcagcgataatagttggcgcgttccggactaaatacactactgttaaactccatcgtccattcggtccagaccagagcctgttccagatcgccaccagccagcgccagcatggcttttaattcaccgatacgcagggtgtaccaaccgttatcgctcccggtcgccagacccaacagctcacgcacgcgggtaaagtcatcaaaaccttcttcatccagttgctcgatgaggttcaggtaatcttctttttcccactcgctgcctggtaggctaagaatcgtttcacgtaaatggctgcccatactgttattcgcgagccacagatcttcagccggataaatatcggacatgccaggcacgataatacggcaagcataaacgcccagatgctcgtaatcggcaatataaacttctttatcttctttgttgaagatagccatcagtgtggcgaactcttcttccgtggtgccggagaaattccagtccacaaacggataatcggcatcctgcttgaacaggtcccaggagattaaaccgctggaatcgataaagtgcgtttcgaggttggtatgttcagcgacttcttcatcatcgaaggttggcggagtaaacacatccaaatctttcaggccacgaccttgcagcagctcggtcacggtacgttccagtgctacgccaaaatcaggatgcgcaccgaaagaggcaaagcaggtaccgttagcaggattgaacagtaccacgcaaatcaccggatactggccgccaaggctaccgtcataagcgaagattgggaaaccctccgcttccagcgtttcgatggcttcaactactgctgggtaacgcgccagcacgtctgccgggatctctggcaggctgatgctttcagcaataatgcggtttttcacgtagcgttcgaaaacttcagacaatccctgaacgcgtgcttcgttgcgggtattacctgcggacataccgttggagacgtacaggttaccaatgatattcatcggaatataaacggtctgattgtcggactgacgcgtaaacggcaggccgcaaataccacgatcttcgttaccggattgtaggtcaatcagcatgctgccggtcagttcattctccggatcataaaacgcgcgcagacggtcatcgagcagcccttctggcacatcgtcattttcggtcagtgggaaccatttttcgttgggataatgcacgaacggaccgttggcgatggtttcgcccagccagaagtccgcaaaaaagtagttggtactgagacgctcgaaatattcaccgagtgcagaagccagcgccgctttcttggttgcgcctttaccgttggtaaaacacagtgcgcactctttgtcgcgaatatgtacagaccagacgttaggcacgggattcagccaggaggcctcttcaatctgaaagccgaggtcactaagtttttgctggaagcgagcgatggaatcttccagagcggcatctttgccggggataaatgtttgcgtcatgaaaatcactttagtcgtacggaaagcgcgcaataatacgggttttatctcaaaggcgctatcaccgccgccatgccgatgaactgttgactatgcttttagcggataaaccacgttaagagcataaaaatgaaggcgttcgatctccaccgtatggcatttgataaagtgccttttgatttccttggcgaagttgcactacgtagtctttatacctttgtactggtctttttgttcctcaaaatgaccggaagacgcggtgtgcggcagatgagcctgtttgaagttttaatcattctgacgctgggaagtgcggcgggagatgtggcgttttatgatgatgtgccgatggtcccggtacttatcgtctttattactctggcgttgttataccgcctggtaatgtggttgatggcgcacagtgaaaaactggaagatcttctggaaggcaagccagttgtcattattgaagatggcgagctggcctggagcaaactcaataactccaacatgacggaatttgagttctttatggagctacgattgcgtggcgtggagcagctggggcaggtacgtctggcgattctcgaaaccaacgggcaaatcagtgtctatttctttgaagatgacaaggtgaaaccgggtttacttattttacccagtgattgtacgcagcgttacaaagtggtgccggagagcgcggactatgcctgtattcgttgtagtgaaatcattcatatgaaagcgggggaaaaacaattatgtccgcgctgtgcaaatccagaatggacgaaggcaagtcgggcaaaacgggtgacctgacagtaaaaacatcggctttttgctaataatccgagagattcttttgtgtgatgcaagccacatttttgccctcaacggttttactcattgcgatgtgtgtcactgaatgataaaaccgatagccacaggaataatgtattacctgtggtcgcaatcgattgaccgcgggttaatagcaacgcaacgtggtgaggggaaatggctcaaatcttcaattttagttctggtccggcaatgctaccggcagaggtgcttaaacaggctcaacaggaactgcgcgactggaacggtcttggtacgagcgtgatggaagtgagtcaccgtggcaaagagttcattcaggttgcagaggaagccgagaaggattttcgcgatcttcttaatgtcccctccaactacaaggtattattctgccatggcggtggtcgcggtcagtttgctgcggtaccgctgaatattctcggtgataaaaccaccgcagattatgttgatgccggttactgggcggcaagtgccattaaagaagcgaaaaaatactgcacgcctaatgtctttgacgccaaagtgactgttgatggtctgcgcgcggttaagccaatgcgtgaatggcaactctctgataatgctgcttatatgcattattgcccgaatgaaaccatcgatggtatcgccatcgacgaaacgccagacttcggcgcagatgtggtggtcgccgctgacttctctagtaccattctttcccgtccgattgacgtcagccgttatggtgtaatttacgctggcgcgcagaaaaatatcggcccggctggcctgacaatcgtcatcgttcgtgaagatttgctgggcaaagcgaatatcgcgtgtccgagcattctggattattccatcctcaacgataacggctccatgtttaacacgccgccgacatttgcctggtatctatctggtctggtctttaaatggctgaaagcgaacggcggtgtagctgaaatggataaaatcaatcagcaaaaagcagaactgctatatggggtgattgataacagcgatttctaccgcaatgacgtggcgaaagctaaccgtagccggatgaacgtgccgttccagttggcggacagtgcgcttgacaaattgttccttgaagagtcttttgctgctggccttcatgcactgaaaggtcaccgtgtggtcggcggaatgcgcgcttctatttataacgccatgccgctggaaggcgttaaagcgctgacagacttcatggttgagttcgaacgccgtcacggttaatgccgaaattttgcttaatccccacagccagcctgtggggtttttatttctgttgtagagagttgagttcatggaatccctgacgttacaacccatcgctcgtgtcgatggcactattaatctgcccggttccaagagcgtttctaaccgcgctttattgctggcggcattagcacacggcaaaacagtattaaccaatctgctggatagcgatgacgtgcgccatatgctgaatgcattaacagcgttaggggtaagctatacgcttagtgccgatcgtacgcgttgcgaaattatcggtaacggcggtccattacacgcagaaggtgccctggagttgttcctcggtaacgccggaacggcaatgcgtccgctggcggcagctctttgtctgggtagcaatgatattgtgctgaccggtgagccgcgtatgaaagaacgcccgattggtcatctggtggatgcgctgcgcctgggcggggcgaagatcacttacctggaacaagaaaattatccgccgttgcgtttacagggcggctttactggcggcaacgttgacgttgatggctccgtttccagccaattcctcaccgcactgttaatgactgcgcctcttgcgccggaagatacggtgattcgtattaaaggcgatctggtttctaaaccttatatcgacatcacactcaatctgatgaagacgtttggtgttgaaattgaaaatcagcactatcaacaatttgtcgtaaaaggcgggcagtcttatcagtctccgggtacttatttggtcgaaggcgatgcatctagcgcttcttactttctggcagcagcagcaatcaaaggcggcactgtaaaagtgaccggtattggacgtaacagtatgcagggtgatattcgctttgctgatgtgctggaaaaaatgggcgcgaccatttgctggggcgatgattatatttcctgcacgcgtggtgaactgaacgctattgatatggatatgaaccatattcctgatgcggcgatgaccattgccacggcggcgttatttgcaaaaggcaccaccacgctgcgcaatatctataactggcgtgttaaagagaccgatcgcctgtttgcgatggcaacagaactgcgtaaagtcggcgcggaagtggaagaggggcacgattacattcgtatcactcctccggaaaaactgaactttgccgagatcgcgacatacaatgatcaccggatggcgatgtgtttcagcctggtggcgttgagtgatacaccagtgacgattcttgatcccaaatgcacggccaaaacatttccggattatttcgagcagctggcgcggattagccaggcagcctgaatgaacaacgggcaataaatagccaaatctttctttatcaaaacgtcggcacattgtcggcgttttttttcggaccttgtgagtcattttgattaatggtagcgtcgcttgtcaatgtaagttgttgatacataatatttatatatgattaatcaacggatgattcacatgaagaatactaaattactgctggcgattgcgacctctgcagcattactgacagggtgtcaaaatacccacggtattgataccaatatggctatcagctccggtttaaatgcctataaagcagcaacattaagcgatgccgatgcaaaagcgattgccaatcagggctgtgccgaaatggacagcggcaatcaagtcgcaagtaaatccagcaagtacggtaaacgtctggcaaaaatcgccaaagcattgggtaacaatattaatggcacgccggtcaactataaggtttatatgaccagcgacgtcaacgcatgggcgatggcgaacggctgtgttcgtgtctacagtggcctgatggacatgatgaatgacaacgaaattgaaggcgttctgggccatgaactgggccacgtcgcgttgggtcacagcctggctgaaatgaaagcttcttatgcgatcgttgccgcacgcgatgccattagtgctaccagcggtgtggcttcccagctttcccgcagtcaattaggtgatatcgcagaaggcgctatcaatgctaaatactcccgtgataaagagtccgaagcagatgatttctcctttgatctgttgaagaaacgtggcatcagcacccaggggctggttggcagctttgaaacactggctagcctggatggcggtcgcacccagtccatgtttgactctcacccaccaagtacagagcgtgcgcaacacatccgtgatcgtatcgcctctggtaagtaaatcattgtcatctttcgggctggtcttctgccagcccgctataattgcgcaataaatccccatctgaatacagacaaaactggtttttgcacacaacgttaacgatttgtggcgtcggcgcgtataatgcgcgcggttatgttaacggtacgcctgttttaaggagataaagatgacggcaattgccccggttattaccattgatggcccaagcggtgcagggaaaggcaccttgtgtaaggctatggcggaagcgttgcaatggcatctgctggacagcggtgcaatttatcgcgtactggcattggcggcattacatcaccatgttgatgttgcgagcgaagatgcgctggtaccgctggcatcccatctggatgtacgttttgtgagcaccaatggcaatctggaagtgatcctcgaaggggaagatgtcagcggcgaaattcgtactcaggaagtggcgaatgcagctagtcaagtcgcggcattcccacgcgttcgtgaagcattattgcgtcgccaacgcgcgtttcgcgaattaccaggtctgattgccgatggccgcgacatgggaacggtggtattccctgatgcaccagtgaaaattttccttgacgcctccagcgaagaacgtgcgcatcgccgcatgctacagttgcaggagaagggctttagtgttaactttgagcgccttttggccgagatcaaagaacgcgacgaccgcgatcgtaaccgagcggtagcgccactggttccggcagccgatgctttagtgttggattccaccaccttaagcattgagcaagtgattgaaaaagcgctacaatacgcgcgccagaaattggctctcgcataagcgaccgaatttgcagtacccccgttgcaatggaatgacagcgggtatgttaaacaaccccatccggcatggagccaggtggacgttaaatataaacctgaagattaaacatgactgaatcttttgctcaactctttgaagagtccttaaaagaaatcgaaacccgcccgggttctatcgttcgtggcgttgttgttgctatcgacaaagacgtagtactggttgacgctggtctgaaatctgagtccgccatcccggctgagcagttcaaaaacgcccagggcgagctggaaatccaggtaggtgacgaagttgacgttgctctggacgcagtagaagacggcttcggtgaaactctgctgtcccgtgagaaagctaaacgtcacgaagcctggatcacgctggaaaaagcttacgaagatgctgaaactgttaccggtgttatcaacggcaaagttaagggcggcttcactgttgagctgaacggtattcgtgcgttcctgccaggttctctggtagacgttcgtccggtgcgtgacactctgcacctggaaggcaaagagcttgaatttaaagtaatcaagctggatcagaagcgcaacaacgttgttgtttctcgtcgtgccgttatcgaatccgaaaacagcgcagagcgcgatcagctgctggaaaacctgcaggaaggcatggaagttaaaggtatcgttaagaacctcactgactacggtgcattcgttgatctgggcggcgttgacggcctgctgcacatcactgacatggcctggaaacgcgttaagcatccgagcgaaatcgtcaacgtgggcgacgaaatcactgttaaagtgctgaagttcgaccgcgaacgtacccgtgtatccctgggcctgaaacagctgggcgaagatccgtgggtagctatcgctaaacgttatccggaaggtaccaaactgactggtcgcgtgaccaacctgaccgactacggctgcttcgttgaaatcgaagaaggcgttgaaggcctggtacacgtttccgaaatggactggaccaacaaaaacatccacccgtccaaagttgttaacgttggcgatgtagtggaagttatggttctggatatcgacgaagaacgtcgtcgtatctccctgggtctgaaacagtgcaaagctaacccgtggcagcagttcgcggaaacccacaacaagggcgaccgtgttgaaggtaaaatcaagtctatcactgacttcggtatcttcatcggcttggacggcggcatcgacggcctggttcacctgtctgacatctcctggaacgttgcaggcgaagaagcagttcgtgaatacaaaaaaggcgacgaaatcgctgcagttgttctgcaggttgacgcagaacgtgaacgtatctccctgggcgttaaacagctcgcagaagatccgttcaacaactgggttgctctgaacaagaaaggcgctatcgtaaccggtaaagtaactgcagttgacgctaaaggcgcaaccgtagaactggctgacggcgttgaaggttacctgcgtgcttctgaagcatcccgtgaccgcgttgaagacgctaccctggttctgagcgttggcgacgaagttgaagctaaattcaccggcgttgatcgtaaaaaccgcgcaatcagcctgtctgttcgtgcgaaagacgaagctgacgagaaagatgcaatcgcaactgttaacaaacaggaagatgcaaacttctccaacaacgcaatggctgaagctttcaaagcagctaaaggcgagtaattctctgactcttcgggatttttattccgaagtttgttgagtttacttgacagattgcaggtttcgtcctgtaatcaagcactaagggcggctacggccgcccttaatcaatgcagcaacagcagccgcttaatttgcctttaaggaaccggaggaatcatgaccaagagtgaattgatagaaagacttgccacccagcaaagccacattcccgccaagacggttgaagatgcagtaaaagagatgctggagcatatggccagcactcttgcgcagggcgagcgtattgaaatccgcggtttcggcagtttctctttgcactaccgcgcaccacgtaccggacgtaatccgaagactggcgataaagtagaactggaaggaaaatacgttcctcactttaaacctggtaaagaactgcgcgatcgcgccaatatttacggttaagttttttactcaaacttgaacgagagaaaagcacctgtcgggtgcttttttcatttctctaatctggaactggaagctgcctcgcagagttttgaacagttttcaccctttcgttaaattcttctgaatatgcctcggggaacgcaaaattcccaccagacaaccgctcaacaaagttgcacactttccataaacagggaggggtgcatgaaaataacgacagtcggtgtatgcataattagcggaatttttccgttgctgattttgccccaattgcctgggacattaacccttgcgtttctgactctcttcgcctgcgtactggcatttatccctgttaaaaccgtccgttatatcgcgctgacgttgctgtttttcgtttggggcatattaagtgcaaagcaaattttgtgggcaggagaaaccttaactggcgcgacgcaggatgcaattgttgagatcactgcaactgacggcatgaccactcattacggtcaaattactcatctacaaggtcgacgtatattccctgcgagtggtctcgtgatgtatggcgaatatcttccgcaagcggtttgtgctggacaacaatggagtatgaaactcaaagttcgtgcagttcatggccaacttaatgatggcggctttgatagccagcgttatgccattgcccagcatcagccgctcaccggccgttttctgcaggcaagtgtcattgaaccgaattgtagcctgcgtgcacagtatctggcgagtctacaaacaacgctgcaaccctatccgtggaatgcggttattcttggtttaggtatgggggaacggttatccgtccccaaagaaatcaaaaatatcatgcgcgatactggaacggcgcatttaatggcgataagcggattgcacatcgcttttgcggcgttgctggctgccggactcattcgcagtggacaaatttttctgcctgggcgctggatccactggcaaataccattaattggcggaatctgctgtgctgctttttatgcctggttgacgggaatgcaacctcctgcattgcgtaccatggtggcgcttgctacgtggggaatgcttaagttaagtgggcgacagtggagtggctgggatgtatggatatgttgtctggcggcaattttgctgatggatcctgttgccattctcagccaaagtttatggctctctgccgctgcggtcgcggcattgatattttggtatcagtggtttccctgtcctgagtggcaactgccgccggtattgcgtgcagttgtttccctcatccatctgcaactgggaatcacacttctgcttatgcccgtgcaaatcgtcatatttcatggcattagtctgaccagctttattgcaaatctattagcaattcccttggtgacatttatcacggttccgttgatcctcgccgcgatggttgtgcatttaagcgggccgttaatcctggagcaagggttatggtttcttgccgaccggtctttggctttacttttctgggggttaaagagtttgccggaagggtggatcaacattgctgaatgttggcaatggctaagtttttccccatggttcttactggtggtatggcgattaaacgcctggcgaacgttgccagcaatgtgtgtggctggaggcttgctgatgtgctggccgctgtggcaaaaacctcgacctgacgagtggcagctgtacatgcttgatgtcgggcaagggctggcaatggtgatagccagaaacggcaaagcgattctctatgacacaggactggcctggcctgaaggggatagtgggcaacaactgattatcccctggctccactggcataatcttgaaccggaaggcgttattctgagccatgaacatctggatcaccggggagggctggatagtatattgcatatatggccgatgttatggatcagaagtccgttaaactgggaacatcatcagccctgtgtgcgtggcgaagcgtggcaatggcaaggattgcgtttcagcgcgcactggcctttacaaggtagcaacgataaaggaaataaccattcctgtgtggttaaggttgatgacgggacgaatagcattcttctaaccggtgatattgaagccccagctgaacaaaagatgctaagccgttactggcagcaagtgcaggcaacattgcttcaggtacctcaccatggcagtaataccagtagtagcttgccattaattcagcgagtgaatggaaaagtggcactcgcaagcgcaagccgctataacgcatggcgactgccctctaacaaagttaagcatcgctatcaactgcaaggatatcaatggattgatactccacatcaaggtcaaacaacggtcaattttagtgcgcaaggctggcggattagcagcctcagggagcaaattttacctcgttggtatcatcagtggtttggcgtgccagtggataacgggtaaaatatgcggctatttcaacaaatgctggttttttgaatgcataacgacaaagatctctctacgtggcagacattccgccgactgtggccaaccattgcgcctttcaaagcgggtctgatcgtggcgggcgtagcgttaatcctcaacgcagccagcgataccttcatgttaagcctccttaagccacttcttgatgatggctttggtaaaacagatcgctccgtgctggtgtggatgccgctggtggtgatcgggctgatgattttacgtggtatcaccagctatgtctccagctactgtatctcctgggtaagtggaaaggtggtaatgaccatgcgtcgccgcctgtttggtcacatgatgggaatgccagttagtttctttgacaaacagagtacgggtacgctgttgagtcgtattacctacgattccgaacaggttgcttcttcttcttccggcgcactgattactgttgtgcgtgaaggtgcgagcatcatcggcctgttcatcatgatgttctattacagttggcaactgagcatcattttgattgtgctggcaccgattgttagcattgcgattcgcgttgtaagcaagcgttttcgcaacatcagtaaaaacatgcagaacaccatggggcaggtgaccaccagcgcagaacaaatgctgaagggccacaaagaagtattgattttcggtggtcaggaagtggaaacgaaacgctttgataaagtcagcaaccgaatgcgtcttcaggggatgaaaatggttagtgcctcttccatctctgatccgatcattcagctgatcgcctctttggcgctggcgtttgttctgtatgcggcgagcttcccaagtgtcatggatagcctgactgccggtacgattaccgttgttttctctagtatgattgcactgatgcgtccgctgaaaagcctgaccaacgttaacgcccagttccagcgcggtatggcggcttgtcagacgctgtttaccattctggacagtgagcaggagaaagatgaaggtaagcgcgtgatcgagcgtgcgactggcgacgtggaattccgcaatgtcacctttacttatccgggacgtgacgtacctgcattgcgtaacatcaacctgaaaattccggcagggaagacggttgctctggttggacgctctggtagcggtaaaagtaccatcgccagcctgatcacgcgtttttacgatattgatgaaggcgaaatcctgatggatggtcacgatctgcgcgagtataccctggcgagcttacgtaaccaggttgctctggtgagccagaatgtccatctgtttaacgatacggttgctaacaacattgcttacgcacggactgaacagtacagccgtgagcaaattgaagaagcggcgcgtatggcctacgccatggacttcatcaataagatggataacggtctcgatacagtgattggtgaaaacggcgtgctgctctctggcggtcagcgtcagcgtattgctatcgctcgagccttgttgcgtgatagcccgattctgattctggacgaagctaccagcgctctggataccgaatccgaacgtgcgattcaggcggcactggatgagttgcagaaaaaccgtacctctctggtgattgcccaccgcttgtctaccattgaaaaggcagacgaaatcgtggtcgtcgaggatggtgtcattgtggaacgcggtacgcataacgatttgcttgagcaccgcggcgtttacgcgcaacttcacaaaatgcagtttggccaatgatcgaaaaaatctggtctggtgaatcccctttgtggcggctattgctgccactctcctggttgtatggcctggtgagtggcgcgatccgtctttgctataaactaaaactgaagcgcgcctggcgtgcccccgtaccggttgtcgtggttggtaatctcaccgcaggcggcaacggaaaaaccccggtcgttgtctggctggtggaacagttgcaacagcgcggtattcgcgtgggggtcgtaagccggggatatggtggtaaggctgaatcttatccgctgttattgagcgcagataccacaacagcacaggcgggtgatgaacctgtgttgatttatcaacgcactgatgcgcctgttgcggtttctcccgttcgttctgatgcggtaaaagccattctggcgcaacaccctgatgtgcagatcatcgtaaccgacgacggtttacagcattaccgtctggcgcgtgatgtggaaattgtcgttattgatggtgtgcgtcgctttggcaatggctggtggttgccggcggggccaatgcgtgagcgagcggggcgcttaaagagcgttgatgcggtaatcgtcaacggcggtgtccctcgcagcggtgaaatccccatgcatctgctgccgggtcaggcggtgaatttacgtaccggtacgcgttgtgacgttgctcagcttgaacatgtagtggcgatggcggggattgggcatccgccgcgcttttttgccacgctgaagatgtgtggcgtacaaccggaaaaatgtgtaccgctggccgatcatcagtctttgaaccatgcggatgtcagtgcgttggtaagcgccgggcaaacgctggtaatgactgaaaaagatgcggtgaaatgccgggcctttgcagaagaaaattggtggtatttgcctgtagacgcacagcttagtggtgatgaaccagcgaaactgcttacgcaactaaccttgctggcttctggcaactaattacgccgcggcagcgttcgattgatggagtcatgaatgagcctgccgcacctctcccttgctgatgcgcgtaatcttcaccttgccgcacaaggcctgttaaacaaaccccgccgtcgagcgagcttggaggatattccggcaacgatctcccgcatgtccttgctgcaaatcgataccatcaatattgttgcccgtagtccatatctggtgcttttcagtcgtctgggaaattatcctgcccagtggctggatgagtctctggcgcgtggcgaattaatggaatactgggcgcatgaagcctgctttatgccgcgtagcgactttcgtcttattcgccaccgcatgctggcacctgaaaaaatgggctggaaatacaaagacgcctggatgcaggaacatgaggcggaaattgcacagttaattcagcatattcatgataaggggccggtacgtagtgccgattttgagcatcctcgtaaaggtgcaagcggctggtgggaatggaagccgcataaacggcatctggaaggtttatttactgccggaaaggtgatggtgattgaacggcgcaacttccagcgcgtttatgatttaacccaccgtgtcatgcctgactgggatgatgagcgcgatctcgttagccaaacagaagcagaaatcatcatgctggataacagtgcgcgtagcctgggaatattccgcgaacagtggctggcagattactatcggctgaaacgtccggcactggcggcgtggcgcgaagcgagggctgaacagcagcaaatcattgctgtgcatgttgaaaaattgggcaatctttggctgcatgatgatttgctgccgctactcgagcgagcgctggccggaaagctcactgcaacgcacagcgcggtacttagcccttttgatcctgttgtctgggatcgcaaacgcgcagagcagctttttgattttagctaccggctggagtgctataccccagcgccgaaacgccagtatggctattttgttctgccgttattacatcgtgggcaattagttgggcgaatggatgccaaaatgcatcgccagacaggcatccttgaagttatctctctgtggttacaggaaggtattaaaccaacgacaacgctgcaaaaagggctacgtcaggcgattactgatttcgctaactggcagcaggcaacgcgggtgacattaggatgctgcccgcaaggcctctttactgattgccgcaccggctgggaaatagaccccgtcgcataaatgattatgataagatttatgcattcataacccgatccatctggaggaactatggatcatcgtctgcttgaaatcattgcctgcccggtttgcaacggaaaactttggtataaccaggaaaaacaagagcttatttgcaaactggacaacctcgctttcccgctgcgtgatggcattccagtgttgctggaaacggaagcccgcgtgctgactgctgatgagagtaaaagttgatgtaaactgctgatgagagtaaatcatgagttttgtggtcattattcccgcgcgctacgcgtccacgcgtctgcccggtaaaccattggttgatattaacggcaaacccatgattgttcatgttcttgaacgcgcgcgtgaaagtggtgccgagcgcatcatcgtggcaaccgatcatgaggatgttgcccgcgccgttgaagccgctggcggtgaagtatgtatgacgcgcgccgatcatcagagtggaacagaacgtctggcggaagttgtcgaaaaatgcgcattcagcgacgacacggtgatcgttaatgtgcagggtgatgaaccgatgatccctgcgacaatcattcgtcaggttgctgataacctcgctcagcgtcaggtgggtatggcgactctggcggtgccaatccacaatgcggaagaagcgtttaacccgaatgcggtgaaagtggttctcgacgctgaagggtatgcactgtacttctctcgcgccaccattccttgggatcgtgatcgttttgcagaaggccttgaaaccgttggcgataacttcctgcgtcatcttggtatttatggctaccgtgcaggctttatccgtcgttacgtcaactggcagccaagtccgttagaacacatcgaaatgttagagcagcttcgtgttctgtggtacggcgaaaaaatccatgttgctgttgctcaggaagttcctggcacaggtgtggatacccctgaagatcttgagcgcgttcgcgctgaaatgcgctaatttcacttcacgacacttcagccaattttgggaggagtgtcgtaccgttacgattttcctcaatttttcttttcaacaattgatctcattcaggtgacatcttttatattggcgctcattatgaaagcagtagcttttatgagggtaatctgaatggaacagctgcgtgccgaattaagccatttactgggcgaaaaactcagtcgtattgagtgcgtcaatgaaaaagcggatacggcgttgtgggctttgtatgacagccagggaaacccaatgccgttaatggcaagaagctttagtacgcccggaaaagcccgacaactggcatggaaaaccaccatgctggcaagaagtgggactgtccgtatgccgactatttatggtgtgatgacgcatgaagaacaccccggccccgatgtcctgctactggagcggatgcgtggtgttagcgtggaggcaccagcccgaacaccagaacgctgggaacaactcaaagaccaaatcgttgaagccttactggcctggcaccgtcaggacagtcgcggttgcgtcggcgcggtcgacaatactcaggaaaatttctggcccagttggtaccggcaacatgttgaagtgctatggaccacgctcaatcagttcaataacaccggtctgacgatgcaggataagcggatcctgtttcgcactcgcgaatgtctcccggcattatttgaaggctttaacgacaattgtgtgctgattcacggtaacttctgtttacgcagcatgttgaaagatagccgcagcgatcagttactggcgatggtcgggccgggactaatgctttgggcaccgcgagaatacgaactgttccgactaatggataattctctggcggaagatttgctctggagttacctgcaacgcgcgccagtggcggagagcttcatctggcggcgttggttgtatgtgttatgggatgaagttgcgcaactggttaataccggacgatttagtcggcgcaacttcgatctggcaagtaaaagtctcttgccgtggctcgcctgatcactcttgccgtggctcgccactgctaccttttagccactgccagatacggccaagcgtttcatagccaacacgatcgctatgcatcaaccagaccggagaagggattgcccgttcccacgggttaagcgggctgtcgatggccaactgattcgccggggctggtagcggatttaacccttcctgctgaaaaaagatcatcgcccgcggcagatgacttgcggaggtcaccagcaggaaaggggcgtcaccaatcgcctgtttcactgctgcagcttcttcttcggtatcttttggcaaatccagggtgataatttgctcgcgcggcacgcccaggctttgcgcaactctggcacctacttccgctgtactcaccgtattggtttttgctacgcctcccgtgaagatcagtttacttcccggattttcgcgccataagcgaataccttcattcaggcgtggcagactgttattgattaaattagagctcggtgcccactgcgggttccaggtataaccacctccgagcaccacgatatagtccactttttggctattattccatgtcggataggtgctttcgatgggacgcagcaggcggtcggctaccggttgcaaactcaataacaagagcgccagccacccaatgctaataaaaatcttcccggttttttgaaaacggctaaaccacagcagcgccaggccagcgccaataatcaacaacatcagcggaagtggcagcaacatattgccaatcacttttttcagtgtaaaaagcatcctttctggttccttttttaaccatatagcaagggatcgccagcgatattacaccagacgggttcattctcgccgtggctgtgacaaaatagcgtctttatcagaaaacgtcttagccaaccggtggagaaagcaatgcaggatcgcaattttgatgatattgcggaaaagttttcccgtaacatttacggcaccaccaaagggcagcttcgacaggctattctgtggcaggatctcgatcgcgtgctggcggaaatgggcccgcaaaaactgcgtgtgctggatgctggcggtggagaagggcagaccgcaatcaaaatggccgagcgtgggcatcaggtcattttatgcgatctttctgcgcagatgatcgaccgcgcaaaacaggcggcagaagcaaaaggtgtgagcgacaacatgcaatttatacattgcgccgctcaggatgttgctagccatttggaaacgcccgttgatctgatattgttccatgcggtgctcgagtgggtggctgatccccgcagcgtattgcagaccctctggagtgtgttgcgtccaggcggcgtgttgagcttaatgttctacaatgcgcatggtttgttgatgcataacatggtcgccgggaattttgattacgtgcaggcgggaatgccgaaaaagaaaaaacggacgcttagcccagattatccacgcgacccggcgcaggtttatctgtggctggaagaagctggttggcaaattatgggtaagacaggcgttcgcgtgtttcatgattatctgcgcgagaaacaccagcagcgcgactgctatgaagcattacttgaattagaaacgcgttattgccgtcaggaaccgtatattaccctggggcgttatattcatgtcaccgcgcgcaaaccgcagagcaaggataaagtatgagtgaattttcccagacagtccccgaactggttgcctgggccagaaaaaatgacttctccatcagcctgccggtagaccgactctcttttctgctggcggttgccacgctgaacggcgagcgtctggatggtgagatgagtgaaggcgagctggtggatgcattccgccatgtgagtgatgcgtttgagcaaaccagcgaaaccatcggcgtgcgcgccaataacgcgatcaacgacatggtgcgtcaacgtctgctgaaccgctttaccagcgagcaggcggaagggaacgcaatttaccgtctgacgccgctcggcatcggcattactgactactacatccgtcagcgcgagttttctacgctgcgtctttctatgcagttgagcattgtggcgggtgagctcaaacgcgcagcagatgccgccgaagagggcggtgatgaatttcactggcaccgtaatgtctatgcgccactgaaatatagcgtagcagaaattttcgacagtatcgacctgacgcaacgtctgatggacgaacagcagcagcaggtgaaggacgatatcgcccagttgctgaacaaagactggcgggcggcgatttccagctgtgaattgttgcttagcgaaacttccggaacgctgcgtgaattgcaggatacgctggaagcggcaggcgacaaattgcaggctaatctgttgcgcattcaggatgcgacgatgacccatgacgatctgcatttcgtcgatcgtctggtgttcgatctgcagagcaaactcgatcgtattatcagttggggccagcaatccatcgacttgtggattggctacgaccgccacgtacacaaatttattcgtaccgcgatcgatatggataaaaaccgcgtctttgctcagcggttacgtcagagcgtacaaacctattttgatgagccgtgggcgctaacttatgccaatgccgatcgtctgctggatatgcgtgacgaagagatggcactgcgcgatgaagaagtgactggggaacttcctgaggatctggaatacgaagagtttaacgagatccgcgaacagctggcggcgatcatcgaagaacaacttgccgtgtacaaaaccagacaagtgccgctggatcttggtctggtggtacgcgaatatctgagtcagtatccgcgtgcacgtcactttgacgttgcgcgtattgttattgatcaggcggtacgtcttggcgtagcgcaagcagatttcaccggactgccagcgaaatggcagccgattaatgattacggagccaaggtacaggcgcatgtcatcgacaaatattgaacaagtgatgccggttaagctggcgcaggcgctggcgaatccgttatttccggcgctggacagcgccttacgtagtggacgccatattggcctcgacgaactggataatcatgcattcctgatggattttcaggaatatctggaagagttttacgcgcgttataacgttgagcttattcgcgcaccagaagggttcttctatttacgcccacgttccaccacgctgatccctcgttccgtcttgagcgaactggatatgatggtcgggaaaatcctctgttatctctatctcagcccggaacggctggcgaatgaggggattttcacccagcaggaactgtacgacgaactgctcaccctggccgatgaagcaaaactgctgaaactggtgaacaaccgtagtaccggtagtgacgttgaccgtcagaagttgcaggagaaagtacgttctagcctcaaccgtctgcgtcgtttaggcatggtgtggtttatgggccacgacagcagcaagtttcgcattaccgaaagcgtgttccgcttcggagccgatgtgcgtgctggcgacgatccccgtgaagcacagcgtcgcctgattcgtgatggcgaagcaatgccgattgaaaatcatctgcaactcaacgatgaaaccgaagagaatcagccagatagcggagaggaagaataatgattgaacgcggtaaatttcgcagtctgacgctgattaactggaacggcttttttgcccgaacttttgaccttgacgagctggtcacgacgctttctggcggtaacggggcgggtaaatccaccaccatggcggcgttcgttacggcgctgatccccgacctgaccctgctgcatttccgtaacactacggaagccggggccaccagcggtagccgcgataaaggtctgcacggtaagctgaaagcgggtgtctgttatagcatgctcgacaccattaacagccgccaccagcgcgtggtggtcggtgtgcgtctgcaacaggttgccggacgcgatcgtaaagtggatatcaagccgtttgccattcagggactgccgatgagcgtgcagccgacacagctggtgaccgaaaccctgaacgaacgccaggcgcgcgtgctgccgcttaacgagctgaaagacaagctcgaggcgatggaaggcgtgcagtttaaacagttcaactccattactgattaccacagcctgatgttcgatctgggcatcatcgcgcgtcgtctgcgctccgcatctgaccgtagcaaattctatcgtctgatcgaagctagcctgtatggcgggatctccagtgccattacccgttctctgcgcgactacctgttgccagaaaacagcggcgtgcgtaaagcgttccaggacatggaagcggcgctgcgtgaaaaccgtatgacgctggaagcgattcgtgtcacccagagcgaccgcgacctgtttaagcatctgatcagcgaagccaccaactacgtggcggcggactacatgcgtcacgccaacgagcgccgtgtccatctcgacaaagccctggagtttcgtcgcgagctacatactagccgtcagcaactggcggctgagcagtacaaacacgtcgatatggcgcgtgagctggcagagcacaacggtgccgaaggcgatctggaagcggattatcaggcggccagtgatcacctgaacctggtgcaaaccgcactgcgtcagcaggagaagatcgaacgctacgaagcggatctcgatgagctgcagatccgtctggaagagcaaaatgaagtggtggcagaagccatcgaacgccagcaagagaatgaggctcgtgcggaagctgccgaactggaagtggacgagctgaaaagccagcttgctgactaccagcaggcgctggacgtccagcaaacgcgcgcgatccagtataaccaggcgattgctgcgcttaatcgtgccaaagaactgtgccatctgccggacttaaccgccgactgcgccgccgaatggctggaaaccttccaggcgaaagagctggaagcgactgaaaaaatgctctctcttgagcagaaaatgagcatggcgcaaaccgcgcacagccagtttgagcaggcttatcagctggtggtggcaatcaacggcccactggcgcgtaacgaggcgtgggatgtcgctcgcgaactattgcgcgaaggggtcgatcagcgtcacctggcagagcaggttcagccgctgcggatgcgattaagcgaactggaacagcgtctacgcgagcagcaagaagctgagcgtctgctggcagatttctgcaaacgtcagggcaagaattttgatatcgacgaactggaagccctgcatcaggaactggaagcacgcattgcctctctttccgatagcgtgtctaacgcccgtgaagagcgcatggcactgcgccaggagcaggaacagctgcagtctcgcattcagagtttgatgcagcgtgcgccggtttggctggcagcgcaaaacagtctcaaccagttgagcgaacagtgcggcgaagagtttacctccagccaggacgtcaccgaatatctgcaacagttgctggagcgtgagcgagaggcgattgttgaacgcgatgaagtgggcgcgcgcaaaaacgccgtcgatgaagagatcgaacgtttaagccagcctggcggctctgaagatcagcgtctgaacgcgctggcggagcgttttggtggtgtgctgctgagtgaaatttatgacgacgttagcctggaagatgcgccgtacttcagtgcgctgtatggcccgagtcgccacgccatcgtggtgccagatctgagtcaggtaactgaacacctggaaggcttgaccgattgcccggaagatctctatctgatcgaaggagatccgcagagtttcgatgacagcgtgttcagcgttgatgagctggaaaaagcggtagtggtgaaaatcgccgatcgtcagtggcgttatagtcgtttcccggaagtgccgctgtttggtcgtgctgcgcgtgaaagccgtattgaaagcctccatgccgagcgtgaagtgctttccgaacgcttcgccacgctctcctttgatgtacagaaaactcagcgtctgcatcaggcgttcagccgctttatcggcagtcatctggcggttgcgtttgagtctgacccggaagcagaaatccgtcaactgaacagccgtcgcgtcgaactggagcgggcgttaagtaatcatgaaaatgataaccagcagcagcgtattcagtttgagcaggcgaaagagggcgttacggcgctgaaccgcattctgccgcgtctcaacctgttggctgatgacagcctggcggatcgcgtcgatgaaatccgcgaacgtctggatgaagcccaggaagccgcgcgttttgttcagcagtttggcaatcaactggcgaaactggaaccgattgttagcgtattgcagagcgacccggaacagttcgaacagttaaaagaagattacgcgtactctcagcagatgcagcgcgatgcccgtcagcaggcgtttgccctgacggaagtggtgcagcgtcgtgcgcactttagctattctgacagcgcagaaatgcttagcggtaacagcgatctcaacgaaaaactgcgtgaacgtctggaacaggcggaagcggagcgtacccgcgctcgcgaagcgttgcgcggtcacgcagcgcagttgagtcagtacaaccaggtgctggctagcctgaaaagttcttacgacaccaaaaaagagctactcaacgatctgcaacgtgaattgcaggatatcggcgtgcgtgctgatagcggggcagaagagcgggcgcgtattcgccgtgacgagctgcatgcgcaactgagcaataaccgtagtcgccgcaatcaactggaaaaagcgcttaccttctgcgaagcggagatggacaacctgacccgcaaactgcgcaagctggagcgggattactttgagatgcgcgagcaggtagtgaccgccaaagcgggctggtgtgcggtgatgcgcatggtgaaagataacggcgttgagcgccgcttacaccgtcgtgagctggcttatctctccgctgatgatttgcgttccatgagcgataaggcgttaggtgcgctgcgtctggcggtggcggataacgaacatctgcgcgacgtgctgcgcatgagcgaagatccgaaacgtccggagcgtaaaattcagttcttcgtggcggtttatcagcatctgcgtgaacgtattcgtcaggatattattcgtaccgatgatccggtggaagctatcgaacagatggagattgaacttagccgtctgaccgaagaattaacctcccgtgaacagaaactggcgatcagttcccgcagcgtggcgaacatcattcgcaaaaccattcagcgcgagcagaaccgtatccgtatgctcaaccaggggttgcagaacgtaagctttggtcaggtgaacagcgtgcgtctcaacgtgaacgtgcgtgaaacgcacgccatgctactggatgtgctctctgaacagcacgagcagcatcaggatctgtttaacagcaaccgtttgaccttcagcgaagcgctggcgaaactgtatcaacgtcttaacccgcagattgatatggggcagcgcacgccgcagaccatcggtgaagaactgctggattaccgcaactatctggaaatggaagttgaggttaaccgtggttccgatggctggctgcgcgcagagtctggtgcattgagcaccggtgaggcgattggtaccggtatgagcattctggtgatggtggtacaaagctgggaagatgaatctcgccgcctgcgcggtaaagatatctctccttgccgcctgctgttcctcgatgaagcagcgcgactggatgctcgttctatcgccacgctgtttgaattgtgtgagcgtttgcaaatgcaactcatcatcgcagcgccggaaaatatcagcccggagaaaggcaccacctataaactggtgcgtaaagtcttccagaataccgaacacgttcatgtcgtcggcctgcgaggatttgcgccgcaactccctgaaacgcttccaggaactgacgaagcgccttctcaggcgagttaaaattaaggcggcagcaatgccgccttttctttttccgaaaactccgtttctgcactaaaaaagtggcacattacggcgcgcttttctttaaacttctttacattaggttatgtaaaaacgtatcggcgtttatatactgaagataagcctgatgagtaacaggcttgctcgtcatactttcgtgagtattggcgttgtacaggcaagtcgtaaaataacagcctggctattcagagtatgataaaaacagggggcaagggatgttgcttaatatgatgtgtggtcgtcagctgagcgcaatcagtttgtgcctggccgtaacattcgctccactgttcaatgcgcaggccgatgagcctgaagtaatccctggcgacagcccggtggctgtcagtgaacagggcgaggcactgccgcaggcgcaagccacggcaataatggcggggatccagccattgcctgaaggtgcggcagaaaaagcccgcacgcaaatcgaatctcaattacccgcaggttacaagccggtttatcttaaccagcttcaactgttgtatgccgcacgcgatatgcaacccatgtgggaaaaccgtgatgctgttaaagccttccagcaacagctggcagaggtggcgattgccggtttccagccgcagtttaataaatgggtagagttactgaccgatcctggtgttaacgggatggcacgcgacgtggtgctctctgatgcgatgatgggctatctccatttcattgcaaatattccggtcaaaggcactcgctggctatatagcagtaaaccttatgcacttgcaacgccgccgctcagcgtgattaaccaatggcagctggcgctggataaaggtcaattgcctacgtttgttgcaggactggcaccgcagcatccgcaatatgcggcgatgcatgaaagcttactggccttactctgtgacaccaaaccgtggccccaactgaccggcaaagcaacgttgcgcccagggcagtggagtaacgacgtaccggcgttgcgcgaaatattgcaacgcacaggcatgttggacggggggccgaaaattactctacctggcgatgacacgccaactgacgcggtagtcagcccatccgctgttactgttgaaacagcagaaactaagccgatggataagcaaacgacgtctcgtagtaaacctgcgcctgccgttcgcgccgcctacgataatgaactggtggaagccgttaaacgttttcaggcatggcaaggattgggggcagatggtgctattggcccggcaacacgtgactggttaaacgtaacgcccgcccagcgtgctggtgtgttggctctcaacatccagcgattgcgcttgctgccaacagagctttctaccgggatcatggttaacattccggcctatagcctggtctactatcagaacggcaatcaggtgctggatagccgagtcattgtcggtcgccccgatcgcaaaacgccgatgatgagcagtgcccttaacaacgtagtggtaaacccgccgtggaacgtacctccaactctggcacgcaaagatattctgccaaaagtgcgcaacgatccgggatatctcgaaagccatggctatacggtgatgcgcggctggaacagcagagaagcgattgacccatggcaggttgactggtctacaatcacggccagcaatttaccgttccgcttccagcaggctccaggcccacggaacagcctggggcgctataaattcaatatgccgagtagtgaggccatttatttgcatgacacgccgaaccacaatctgttcaagcgtgatacacgcgcattgagcagtggctgtgtacgagtgaataaagcttccgatctggcgaatatgctgttgcaggatgcaggctggaatgacaaacgtatttctgatgcgctgaagcagggtgatacacgttacgtcaatattcggcagagcattccggtgaatctctactacctgacggcctttgttggtgcagatggtcgtacccagtatcgtacagatatttacaattatgatctgcctgcgcgatccagcagccaaatcgtaagcaaagcggaacaattaatcaggtaaatgaagtagttcggggaaatcagttgtcgtaataattagcatgattgggggcgattctctgcagcccccgtcactgctggggttgagtcatcttgacgtctgctttacgggcggttaaggtgcctcttgtgcgccagaagtgcatataaacgataacattgacctgtagacttgattatcatggacaaattcgacgctaatcgccgcaaattgctggcgcttggtggcgttgcactcggtgccgccatcctgccgacccctgcgtttgcaacactctctaccccacgcccgcgcattttgacactcaataatcttcataccggagagagtatcaaagcggagtttttcgatggcagaggctatattcaggaagaattggcaaaacttaaccattttttccgcgattaccgcgcgaacaaaataaagtccatcgacccaggattattcgaccagttgtatcgcctgcaagggttgttaggcacgcgcaaaccggtgcaactcatttccggttatcgttctattgataccaacaatgaactacgcgcccgcagccgtggagtagcgaagaaaagctatcacactaaaggccaggcgatggatttccatattgaaggtatcgcgttaagcaatattcgcaaagccgcgttatctatgcgcgcaggtggtgtaggatattatccacgtagtaactttgtgcatattgataccgggccagcacggcactggtaataattgcttaacgaaacaggggcagtatgaactatcgtattattccggtcaccgcattctcccagaactgtagtttaatctggtgtgaacaaacccgtctggccgcactggtcgatcctggcggcgatgcggaaaaaatcaaacaggaagttgatgacagcggcctgacactgatgcagatcctgctgacgcatggtcatctggaccacgttggcgcagcggcggaactggcgcaacattacggcgtgccggttttcggcccggaaaaagaagatgagttctggctgcaaggcttgcctgcgcaaagtcgtatgtttggtctggaagagtgccagccgctgacgccagatcgttggctgaacgaaggcgataccatcagcatagggaatgtgactttacaggtgttacattgccctgggcatacgccgggtcatgtcgtgttttttgatgatcgggcaaagctgctgatttctggcgatgttattttcaaaggcggagtagggcgcagtgacttcccgcgtggcgatcataatcaactgatttctagtatcaaagataaattgctgccactgggggatgacgtgatatttattccgggtcacggaccattatccacacttggttatgaacgcctgcataatcccttcctgcaagacgaaatgcccgtctggtaaggcacataaaaaagcccgcttttaatgctggcctggatttctggcaaagtgcgctttgtttatgccggatgcggcacgagcgccttatccggcctacaaaatcgtgcaaattcaaaatattgcaggggacgcgtaggcctgataagcgtagcgcatcaggcaatgttgcgtttgtcatcagtctcagcccgcttttcagcgggcttcattgtttttaatgcttacagcactgccacaatcgcttcgcacagcggagccatgttatctggtgtcatcccggccacatttacgcgaccagaagcaaccgcatatacgccaaactcttcgcgcagacgcagcacttgttcttttgtcaggccactgaaggagaacatgccgttctgtttgatgataaagctgaagtcgcggtttgcgcctttttcctgcagcgtattgacgaacaactgacgcatacgctgaatacgctggcgcatatcagtcagctcttgttcccaaatcgcacgtaacgcatcgttgctcaggatggtggcaacaacagaagcgccgtgtgctggtgggttagagtagttagcgcgaatcgccgctttcatttggctgaatgcgcgatcaacggtttcactgtcggcagcaaccagagtacaagcgccaacacgctcgttgtacaggccaaagtttttagagtaggaactggcaacaatcagctctttatgcatagccgcgaaagcgcgcagtccttcagcatcttcttccagaccacgggcaaaaccctggtaagcgaagtcaaacagcggtaaccagcctttctcaacggagagttgtgccagtgtttgccattgttccagcgtagggtcgataccggttgggttatggcagcagccatggaacagcactacgtcgccagcctgagcttcattcaggctgttaatcagtgcatcgaagtcaagagtgtgattttccgcatcataataagcgtattcacgaacttccagacctgcagagttaaagacgctcttatggttcggccagcttgggttgctcacccacacacgcttaacgctggtattttttgccaggaaatcggcagccacgcgtagtgcgccagtgccccccggagtctgtgccgtgcgagcacgtttgtcattgatcagggcgctacctttaccaaacagcagttcctgagtgcagcgaccaaattcagggatgccgtcaatgccgaggtaatttttggtggtttcattttcgagcagatactgttcagcctttttcacgctggtcagtaccggggttttgcccgtctcatctttatagacaccaatcccgaggttaattttgccgggacgttcatcggcacgaaacagatcggccaggcccagaatcgggtcggcaggagcggcggtaatgttctcaaacatgacgaggttccattatggttacagaagggaagtccgctatcagggtaacgggagatttacaaaattccaactattactgatgaaaacgcaggctgtttttgcaagacgtgagattgctctggaaggtataaaaaaaacaggaccaaagtcctgttttttcggcatttaacaaagaggtgtgctattagaactggtaaacgatacccacagcaacggtgtcgtcactacctacgcccagtttgttgtcagaatcgatctggttgatgatgtagtcaacataggtggacatgtttttgttgaagtagtaggttgcgcccacttcaaagtagttcaccagatcaacatcaccgataccttctacgtctttcgctttagatttggtgtaagcgatggacggacgcagaccgaaatcgaactggtattgcgcaactaacagaacgtcttgcgttttgttggcgaagccgctggtgtttgtaaatttattagtgatcggcgtagcgttacgggtttcaccgtagttcgctgccaggtagatgttgttcgcgtcgtacttcagaccagtagcccactgttcagcttttttaccgttgccaagaggttgagcttcttgcaggttggtacggtcagctgcaccataagcaccaacgataccaaagccttcgtattcgtagctgatagaaccgccaacaccgtcgccgttagaacggcgtgcagtgtcacgctcgtttttacccaggtactgaacagcgaagttcaggccatcaaccagaccaaagaagttggagttacgataggtagcaacgccgccaacacgaccaacgaagaagtcatcgctgtatgcagtatcaccaccaaattctggcagcatatcggtgtaacccagtgcatcataaaccacaccgtagttacggccgtaatcgaaagaaccaacgtcagcgtatttaagacccgcgaatgccagacgcgttttgttaccagtttgagcgtcagcgccttcagagttgttaccctggaagttatattcccactgaccataaccggtcagatcggaattgatttgagtttcccctttaaaaccaagacgggcataggtcatgtcgccattgccaccgtaactgttttcaccgttacccttggaaaaataatgcagaccaacagctttaccgtacagatctactttgttgccatctttgttatagatttctgcagcgtttgcagtacctgctactaacagagcagggacgatcactgccagaatattgcgcttcatcattatttattaccctcatggttttttttatgacacctgccactgccgtcaataagttctgtcaataaaaatttacggaactattgatgagagtttggtgtctttatgtgtctgcaggcatctttccattcaaactaacgtttcgctaccgtgaaagtgctacaaagataaagatttggtttcaaaaagaaaaaatatgtaaccaaaagtaaaatttaaggaactttgtgaacaccgtcatatttccatagagacgtgatgatatttacagcaattttaatctatttatatgatttccttatatttaaattaactaaacggaaattttgtttctgatggaaactttatcgacctggcacaaaatcttctttcagacatccagaatgccaaaaaatagtatgaaaattgtgctattagctaagaaaaaactaatccgcaataagaatgcggattagtttttgcgcgtaaatgttgcaatgtaatattccgtaacaggatgatcgttatggcggggttgcaaatagattgcttgacttaacaaacagataacttgacagaaaagataaaaaaagagccagcgggcgctggctcttgaagacgctaaattagaagctggcgttacgcggagtacgtgggaacggaatcacatcacgtacgttttgcacgccagttacgtaagcaatcagacgttcaaaaccaagaccgaaaccactatgcggaacagtaccgtagcgacgcagatcgcgataccaccagtaatcttctttattcaggcccatttccagcatacgctcgtccagcacgtccagacgttcttcacgctgggagccaccaatgatctcaccgatgcccggagccagaacgtccatagccgcaacggttttaccgtcttcgttaaggcgcatatagaacgctttaatatctttcggatagtttttaaccactaccggtgctttaaagtgttcttccgccagataacgctcatgctcagaagagagatcgactccccagtaaaccgggttttcaaacttcctgccgcagttttcgagaatggtcactgcgtcggtataatccacctgcgcaaaatcggcttcaatgaagcgttccagacgactaacggcatctttatctacgcgttcagcgaagaatttcatgtcgtcagcgcgttcttcgagaaccgctttgaagacatatttcagcatggcttcagccagacccgcaatatcgttcaggttagcaaacgccacttccggctccagcatccagaattccgccaggtgacggctggtgttggagttttcagcacggaaagtcgggccgaaggtataaattttggacaatgcgcaagcgtaggtttcgccgttcaactggccagatacggtcaggaaagactctttaccaaagaagtctttgtcgaaatccactttgccctgatcgttacgcggcaggttttccagatccagcgtagaaacgcggaacatttcgcctgcaccttcggtatcagatgcggtaatcagactcgtactaacccagaagaatccctgctcgttaaagaagcgatgcagcgcctgcgccagcgtatggcgaacgcgcgcgacggcaccaatcaggtttgtgcgcggacgcaggtgagcgacttcacgcagatactcaatgctgtggcgttttgccgccatcgggtaagtgtctggatcttcaacccaaccagcaacttcaaccttgctggcctgaatttcaaattgttgcccctggcccgggctcgccacgactttacccgtcacaatgacgctgcagccggtggtcagacgcaggacgtcttcattgtaattgggcagagaattattgatgacagcctgtacaggatcaaagcaggaaccgtcataaacggcgaggaaggagatgccagctttactatctcggcgggtacgtacccatccgcgcacggtgacttcgctgtcaacggctacacggccctggagtacgtcggctacaggcacaacgctcataatattctctctgttaatagtcggaaaaaataaacacttgtccacccgtaaatggggggatacctatgttacctggcatctgcaatcagacaagcagaattcgcaaatgcagcgaaagatttcggaattaaaggtaaaaaaagggagccgattagctccctgatgatattaactggcttttttaatatgcggaaggtcgaacgctttgcgcagcgcccgaacaaacgctttatcatggcagatagttttgccagggctgtcagaaagtttcgccaccggtttaccgttacactctaccaacttaatgacaatattcaggggttttacctgggggatatcgcaggtcaggcgagtcccaataccaaaacttaattgcacgcgggaagagaagtggcggtatagctcaaccgctttgcgtaaatccagattgtcagagaaaaccagcgttttactctgtggatcaattcccagcttttcataatgtgcaatggctttttcaccccattcaaccgggtcgccagagtcatgacgcaggccctgataccgactagcgaactcgacaccgaaatcacgcaggaaagcatccatagtgatgcagtcggttaatgcaatgccaagttggtcgggatactcttccagccaggcagcaagtgcagctcgctggctgttggctagatccgggctgatttgctgatgtgcctggaaccattcgtgtgcctgtgttcccatcggcgtgagggaaagccgacgcgccagatcgtagttgctggtgcccacaaaccaggattcctgttgcagacgcttaacgatggtttcttgtacttcgcgagaaaaacggcgacgggtgccaaaatccatcagatggaagcggctcatatcaagaccggcggttaacgcgctgaagtcgactaatttgctttccagcgtgtcgagggcttgcgcaacgtcggcctgcggactgcgatagcgatgtaccatttcactgataaccgccagcaaaggaacttcccagaggatgacttcacgccacgggccgcttaaacgaatatccagcttgccattatcgttggacacggtgacttgttccgggttaaagcggaactcgcgtaaccagttaagatagtcggccttaaagaaaggcagggcagaaagccactgatattcatcatcctgcaggcgcaggtgctgcatcgcctgaacctgttcacgaatagcatcggcataaatacccagcagatcgtcacctcggcaacgaaactccgccgcgacatgcacatcgtaatagtgatgaaacacggcttgctgcatatgcaacttataagcatctgtatccagcaagctgtgcagaacaggagaagcgaattgtgtcataggtgcgcagtagcgtcctcgtacaggagcgtttagtacaataaacatcttcaggaactgctggagtataccttgtttcgcaatttattgaaccccgatcacaccatatgccacctttctggtcgatggcattacgcggtgtatgttataaaaatgtagcaataaaggcgtttgtacctgaaaagatgaagattctgcatagcgcgatttacgcaacaggaatagactgaacaccagactctataaaagatgctaaaggttatttatgactcaacagccacaagccaaataccgtcacgattatcgtgcgccggattaccagattactgatattgacttgacctttgacctcgacgcgcaaaagacggtcgttaccgcggtcagccaggctgtccgtcatggtgcaagtgatgctccccttcgtctcaacggcgaagacctcaaactggtttctgttcatattaatgatgagccgtggaccgcctggaaagaagaagagggcgcactggttatcagtaatttgccggagcgttttacgcttaagatcattaatgaaataagcccggcggcgaataccgcgctggaagggctttatcagagtggcgatgcgctttgcacccagtgtgaagccgaaggtttccgccatattacgtattatctcgaccgcccggacgtgctggcgcgttttaccaccaaaattattgccgataaaatcaaatatcccttcctgctttccaatggtaaccgcgttgcgcaaggcgaactggaaaacggacgccattgggtacagtggcaggacccgttcccgaaaccgtgctacctgtttgcgctggtggcaggcgactttgatgtactgcgcgatacctttaccacgcgttctggtcgcgaagtagcactggagctgtacgtcgatcgcggcaaccttgatcgcgcgccgtgggcgatgaccagcctgaaaaactccatgaaatgggatgaagaacgctttggcctggagtatgacctcgacatctatatgatcgtcgcggtggatttcttcaatatgggcgcaatggagaataaggggctgaatatctttaactccaaatatgtgctggcccgcaccgacaccgccaccgacaaagattacctcgatattgaacgcgttatcggccatgaatatttccataactggaccggtaaccgagtgacctgtcgcgactggttccagctcagcctgaaagaaggtttaaccgtcttccgcgatcaggagttcagctctgaccttggttcccgcgcagttaaccgcatcaataatgtacgcaccatgcgcggattgcagtttgcagaagacgccagcccgatggcgcacccgatccgcccggatatggtcattgagatgaacaacttctacaccctgaccgtttacgagaagggcgcggaagtgattcgcatgatccacaccctgcttggcgaagaaaacttccagaaagggatgcagctttatttcgagcgtcatgatggtagtgcagcgacctgtgacgactttgtgcaggcgatggaagatgcgagcaatgtcgatctctcccatttccgccgttggtacagccagtccggtacaccgattgtgaccgtcaaagacgactacaatccggaaaccgagcagtacaccctgaccatcagccagcgcacgccagccacgccggatcaggcagaaaaacagccgctgcatattccgtttgccatcgaactgtatgataacgaaggcaaagtgatcccgttgcagaaaggcggtcatccggtgaattccgtgctgaacgtcactcaggcggaacagacctttgtctttgataatgtctacttccagccggtgcctgcgctgctgtgcgaattctctgcgccagtgaaactggaatataagtggagcgatcagcaactgaccttcctgatgcgtcatgcgcgtaatgatttctcccgctgggatgcggcgcaaagtttgctggcaacctacatcaagctgaacgtcgcgcgtcatcagcaaggtcagccgctgtctctgccggtgcatgtggctgatgctttccgcgcggtactgcttgatgagaagattgatccagcgctggcggcagaaatcctgacgctgccttctgtcaatgaaatggctgaattgttcgatatcatcgacccgattgctattgccgaagtacgcgaagcactcactcgtactctggcgactgaactggcggatgagctactggctatttacaacgcgaattaccagagcgagtaccgtgttgagcatgaagatattgcaaaacgcactctgcgtaatgcctgcctgcgtttcctcgcttttggtgaaacgcatctggctgatgtgctggtgagcaagcagttccacgaagcaaacaatatgactgatgcgctggcggcgctttctgcggcggttgccgcacagctgccttgccgtgacgcgctgatgcaggagtacgacgacaagtggcatcagaacggtctggtgatggataaatggtttatcctgcaagccaccagcccggcggcgaatgtgctggagacggtgcgcggcctgttgcagcatcgcagttttaccatgagcaacccgaaccgtattcgtagcttgattggcgcgtttgcgggcagcaatccggcagcgttccatgccgaagatggcagcggttacctgttcctggtggaaatgcttaccgacctcaacagccgtaacccgcaggtggctagtcgtctgattgaaccgctgattcgcctgaaacgttacgatgccaaacgtcaggagaaaatgcgcgcggcgctggaacagttgaaagggctggaaaatctctctggcgatctgtacgagaagataactaaagcactggcttgataaataaccgaatggcggcaatagcgccgccattcggggaatttacccctgttttctcaggcgagtttcagattcaccacgttgcatcacccgttgcaacacctccgcttccagctccgctaatcgcacgctccctaatcgacgcggacgggggatatccactgtcaaatccagaccaatttttccctcttcaattaacagcacccggtcagccatcgctaccgcttcgctcacatcatgcgtcaccaacagtacggtaaagccgtgctcctgccaaagactcacaatcaaatcctgcatctcgagtcgcgttaaggcgtccagcgccccgagcggttcatcaagcaacaataatcccggtcgatgaatcaacgctcttgccagcgccactcgctgtttctgcccgccagaaagtgcggcaggccattcccctgcgcgattctccagtcctaccgcagccaacgctcgacgtgcggcatcgcgccactggcctttaaggcctaacccaacgttatcaatcacgcttttccacggtagcagacgcgcatcctgaaacatcattcgcgtgtcttcctgaatttcagccagcggtgtggtgcccgctaacacatcgcctgcggttggcgtttccagacctgccagcaggcgcagcagggtacttttgccaccaccgctgcggcccaccaccgccacaaactgacctgccggaatatgtaaatccagttggttcaggacgatattttccgcgtaatgtttgcttactgcattgagcaacaatggcgtgccctggttcagacgagcagtattcataccgtggcctccttcaaatgataagccgggttccagcgcaaccagaggcgctctaacagctgcgcgctgacgtcagccagtttgccgagcagggcgtaaagaataatagcgactaccaccacgtccgtttgcaaaaactcccgcgcattcatcgccagataaccaatgccactattggcagaaatggtttcggcaacaatcagcgtcagccacatcaggcccaacgcaaaacgcacgccgaccataatactgggcagggcaccaggcaggatcacatggataaacagcggtatgccggataatccatagctacgcgccatctccaccaacccgcgatcgatattacggatgccatgccaggtgttgatataaatggggaatagcgtaccgagcgccaccagaaagatttttgcggattcatcaatgccaaaccacaaaatcaccagcgggatcagcgccagatgcggcacgttgcgcaacatctgaatactggtatccagcagccgttctccccagcgagatagcccgctaatcagtcccaaaatcaaccccaggcttccgccaatactaaagccaatcagcgcccgccaggagctgatcgccagatgctgccacagttcgccgctggcggagagcgtccagaacgccgtcaccactccttccggactaggcaaaatacgcgtgctcagccagccaacgctggaggccagttgccacaccgccacgatgcccaccggtaaaaaccagggggcaacgcgcaataaccacttcttcactggcgttgccattatttcttccttagctttgcgcgactttacgggggataaaatcattcgccaccgcttcgccttgcggattcagcggctgcggctggggaatttccgggatggcgacatccagaagcgggaacagcaactcgccaacccgatacgcttcttccagatgcggatagccgctaagcacaaaactgtcgatgccaagcgcggcatattcgttgattcgcgcagcgaccgtaggaccatcgcccaccagcgccgtcccggcaccgccgcgcactaagccaacgcccgcccataaattggggctgatctccagattgtcgcgcttgccgttatgtaacgccgccattcgctgttgccctacggaatccgtccgggcgaatgcggcctgtgctttggcgatagtttcatcatcaagatggctgattaaccgctcggcggcctgccacgcttcgtcgttagtttcacgaacaatcacatgcagacgaataccgaaacgaattttgcgtccatgcgcggcagctttcgcccgcacttgttcgattttctctttaaccagttccggcggttcgccccaggtgaggtagagatcaacctgttctgccgccagctcctgggcgacatcactgcttccgccaaagtaaagtggcggatacggctgttgaatcgccgggaagagcagttttgctccgcgcacatgaatatgtttaccgttgaaatcgacggtttctctctgcaataaacgccgccagacctgggtaaattccgcgctggcttcgtagcgctcgctatgatcaaggaacactccgtcgcctgccagctcttgtggatcgctgcctgtgaccaggttaaacaacgcacgtccattactgagacggtcaagcgtggcggcctggcgggcggcaacggtaggactggttacgctgggacgcagggcgacaagaaacttcagccgctgcgtcaccgggatcatgcttgcggcaaccagccacgcatcttcgcaggagcgccccgttggaattagcacaccggtatagccaagacgatccgccgcttgcgcaatttgttgcagataaccgtgatcaaccgggcgactaccttcttccgttcccagataatgcccgtcaccgtgggtcggtaaaaaccagaacatattcagactcataattgttttccttccagttgagtgggctgccagatgcgctggcgaatatcgacttttttcggcaccagacgattttcataaaacagatctgccgtttgctgctgtaaggcggcaacctcggcgttaaccggtttgatggtggtaggagggcgatgatctaagtaagaggcaatcaccggtgccggtaagcccatcgtttttgccagtaaagcgatgctttgctcgcgctggctgcgggttaacgcatcggcctcactaaaggttgccagtacgccctgaataaaagcgccgtttttttctgcatagggacgagctgccagataaaagcttccagtttgattgagatcggtgccgtctttcagcacccgcacgccgccctgtaataatgcagcagagtagtagggatcccagatagcccaggcgtcaacgttaccttgctggaacgcggcgcgggcatcagcgggcgtcaggtaagtgggttggatatcggtaaacttaagtccggcctgacgcagtgcacgcagtaaaaggttgtgactactggaacctttctgaaaggcaactttgtgacctttaagatcggctacggttttgatcgggctgttttctgccaccagaatcacttcggctttgggcttcggtggctcgacgcccacgtacaccaaatcagccccggcagcctgggcaaagattggcggaatatccccggtactgccgagatcaatactgccaacgtttaacgcttccaacatttgcggacccgcggggaactccacccaggagattttactttccggatagcgtttttccagtaactggtggctttttgccagcaccataccaatactgcctttctgatagcctatacgtaacgcttcagggctggattctgcagcaaccgcaaaagtagagacgctaagcaatcccgccagcgccagtttaatgatgttacgcatgggcattacctcgcagagacagaaggtcaggaacctgaacatcgcggcggtgcaatgcctgccagaaagtttctagcgcggtatcaagacgggtttgcagatttggcgtgaactggggtctgtgatggtaatcaattacttgactgtcatcggcaaacacgccgtgcaggatctcctgagctttcagtgcgcttaaaactggtttaagggcataatcgaccgccagcagatgggccacggtaccgcccgtcgccagcggtagcaccactttgccttgcaaagcgcgttctggcagcaggtcgagcagggttttcaacgcaccggaataggcggctttatacacaggcgtggcgacaatcagcccatcggcctgttgcagctgttcggtgaaggtcttgagtgccggactatcgaaacgagcataaagtagatcttccggggcgaagttttgcagattccagtgataaacctctacatccaggccatttagtttttcccgcgcatattccagcaaggagctggagcgagaaggaaagcgaggactacccgccagggtgatgacacgcatactctctccttataaccaattgttctttttttgttaacattgataacaattcggtcagtctgtcggagagacaagaaaattccaaatataaattttgtgtatctttttctgaaaataaactaaagaaagggctttatatatcacgcatatttatttattggatagtcattagatgttgaatcaatgaattactcgttcagttaatatttaaatattcatgaaatctataaattaaagatttgtcacttattggatttagtatgcttgatttaaatggcggacaattattgttattattaagtctaatgtcatttaaaggcattatcatatttacgaagagatcaggatgataacgatgaaaaaaagtgtattgacggcgtttataactgtggtatgtgcaacgtccagcgttatggctgctgatgataatgctatcacggatggcagtgtaacatttaatggtaaagttattgctccagcttgtaccctggtagctgcgacgaaagattccgtggtgactttgccagatgttagtgccacgaagttgcaaaccaatggtcaggtttctggcgtgcaaattgatgtgccaattgaattaaaagattgtgatactaccgtaacaaaaaatgcaacgttcacctttaatggcactgcggatactactcagattacagcgtttgctaaccaggccagttctgatgctgctacaaacgtggccctgcaaatgtatatgaatgatggtacaacggccatcacgccagacacagaaaccgggaacattttgttgcaggatggagatcagacgttgacttttaaagttgattatatcgctacggggaaagcgactagtggtaatgtgaatgcggtaacaaatttccatattaactattattaatagaactcattaattgttttattaattagtacccctccagtgttctggaggggatattcatattttttaagagtgactatttatgaaaacttgcataacaaagggaattgtgaccgtaagtttaacggcaatattactcagctgcagttccgcatgggcggcaggtaaaggcgggattggacttgcagcaacacgtcttgtttatagtgaaggtgaagagcaaattagtctgggtgtacgtaacaccagtccggatgttccttatcttattcagagttgggtgatgaccccagataataaaaaaagtgcagactttattattacaccaccgctatttgtgctgaatccggcaaatgagaatctgttacgcattatgtacattggagcgccgttggcgaaagacagagaaacccttttcttcactagcgtacgggcagtccctagtacaacgaagcggaaagagggaaataccctgaagattgccacacaaagcgtcatcaaacttttctggcgaccaaaaggtttagcgtatcccttaggcgaggctccggcgaaactgcgttgcactagcagtgctgacatggttacggtcagtaacccaacaccttatttcattaccctgacagacctgaaaataggtggaaaagtagttaaaaatcaaatgatttccccctttgataaataccaattttctctgccaaagggggccaaaaatagcagcgtaacgtatcgaaccatcaatgactacggggcggaaacgccgcaactcaactgtaaaagctaagccgtcttcagttaagagagcgagatgtatagaactcatcgacaacacagcctgttaagctctggtggagtgccaagctttattggtgggctggtggtgtttgtgagcgcagcgttcaatgcacaagctgaaacctggttcgatcctgcttttttcaaagatgatcccagtatggtggccgatttgtctcgtttcgaaaaaggacaaaaaataacgccaggggtttatcgtgtcgatattgttctgaatcagacaattgtagatacgcgcaacgtcaattttgttgagataacgccagagaaggggattgccgcctgtttgacgactgaaagcctggatgcaatgggtgttaatactgatgcgtttccggcttttaaacaactggacaaacaagcgtgtgtgccattggcggagattattccggatgccagcgtaacgtttaatgtgaataaactccgtctggaaattagtgtaccgcaaatcgccatcaaaagtaatgcccgtggttatgtcccccctgaacgttgggatgaagggatcaacgcgctattactgggatatagctttagcggggctaacagtattcatagcagcgcagacagtgattctggcgacagctattttctgaatttaaacagtggcgttaatttaggcccatggagattgcgcaacaatagtacatggagtcgtagtagtggccaaaccgcagaatggaagaatctcagcagctatttgcaacgggcggttattcctctgaaaggcgaactgaccgtaggtgatgattatactgcaggcgattttttcgatagtgtcagctttcgtggtgtgcagctggcgagtgatgacaacatgctgccagacagcctgaaagggtttgcgcctgtggtgcgtggtatcgccaaaagcaatgcccagataacgattaagcaaaatggttacaccatttaccaaacttatgtaagccctggtgcttttgaaattagtgatctctattccacgagcagcagcggtgatttgttagttgaaatcaaagaagcggacggcagcgtcaatagctacagcgtaccgttctccagtgtgccattactccagcgtcaggggcgaatcaaatacgcggtgacactggcgaaatacagaaccaatagtaatgaacagcaggagagcaaatttgcccaggccacgttgcagtggggcggaccgtggggaacgacctggtatggtggtggacaatatgctgaatattaccgtgccgccatgtttggtctgggatttaacctcggcgatttcggagcaattagcttcgatgcgacccaggcgaagagtacgctagcagatcaaagcgaacataaaggtcagagttatcgttttctgtatgccaaaacgctcaaccacttgggcactaactttcaattgatgggctatcgctatagcacgagcggtttctacaccctttccgacaccatgtataaacatatggatggctacgaatttaatgacggtgatgatgaagatacgccgatgtggagccgttattacaatttgttttacaccaaacgtggcaaactgcaggtcaatatctcccagcaattaggcgagtacggtagcttttatttaagtggtagccagcaaacttactggcatacggatcaacaggatcggctattacagtttggctacaacacgcaaattaaagatcttagcctggggatttcctggaactacagtaagtcccgtggtcaacctgatgctgatcaggtgtttgctctaaatttttccctgccgctcaatctgttgctccccagaagtaatgatagctataccaggaaaaaaaattacgcctggatgacctctaacaccagtatcgataacgaagggcacactacacaaaacctgggtttaacggagacattactcgatgacggtaacctgagctacagcgtgcaacagggatataacagcgaggggaaaacggctaatggtagcgccagcatggattacaaaggggcgtttgcggatgcccgagtgggctacaactacagcgataacggcagtcaacaacaactgaactacgctcttagtggcagtttagttgcccatagtcagggcattaccctggggcaaagcctgggggaaactaacgttctgattgcagcaccaggcgcagagaatactcgtgtggcgaacagcaccgggctgaaaactgactggcgcggatataccgttgttccttatgccacttcttatcgggaaaatcgaatcgcacttgatgcggcgagcttaaaacgtaacgtggatcttgaaaatgcagtagtcaacgtggttcccaccaaaggggcgttggttctggcggagttcaatgcccatgcgggtgcaagggtattaatgaaaacaagtaagcagggtataccgctgcgttttggcgcgatagcgacgctggacggcgtacaggctaatagcggcataattgatgatgatggcagcctctatatggcgggtttaccggcgaagggaacaataagcgtgcgctggggcgaagctcccgatcaaatttgtcatatcaattacgagcttaccgaacaacaaattaactctgcgattacgcgaatggatgccatatgcagataatctttggagaaaaatgcgtgagtttactacgactattttttgccgccgtcttaatgttatggtgcgctcaaaccgctgcttatagcgggcagtgtcatactactcaggggaatccgtatattggcgtcaattttggcgttaaaaccctggaggaagaagcaaatacggcaggggtagttaaagacaaattttatcagtggaacgaaagcaatgattattatgtttcctgtgattgcgataaagacaatgtcagaagtggccgatgggcattcgccgcggatagtccgttagtctatttaggcgacaactggtacaaaattaatgactatcttgccgccaaagttttattgcaggttaaaggcagttctcctactgcggttcctttcgaaaacgtgggcacagggggggatacccgatggcatatttgcgaccctggcggtcaacgtttaggtgggcagggggcaagcggtaatagcggtagcttttccctgaaaatattgcagccgttcgttggcagcgtcgtcattcctcctatggcgctggcgcgattatatgaatgctacaacatacccgcaggtgattcctgcacgactacaggtacaccggttttagtgtattacctgtctggtacgatcaatagtcttggcagttgttccgtcaatgccggagagacaattgaagttgatttaggtgatgtcttcgctgccaatttccgtgttgtagggcataaacctcttggggccagaacggcagaacttgcaattccagtcaggtgtaacacgggaaacgcgggattagttaatgtcaacctgagtctgacggcaaccacagaccccagctatccccaggcgattaagacgagtcgtcctggcgtgggcgtggtggtgaccgatagccagaacaacattatttcccctgctggtggaacattaccgctctctattcctgatgatgcagacagtatcgcgcgaatgaatgtctatccagtcagcacgacaggtgtaccaccagaaaccgggcgatttgaagccacggcaacggtgagaataaattttgattaacgcgtgaacgtatgaagaaaaaaacgatatttcagtgcgttatcttgttctttagcattcttaacatccatgtcgggatggctgggcctgaacaagttagtatgcatatttatgggaatgtggtcgatcagggctgtgatgtcgccaccaaaagtgcattacaaaatattcatattggtgattttaatatcagtgattttcaggccgcgaataccgtaagcactgctgctgatttgaatatcgatatcaccggttgtgccgctggtattactggcgcggacgtcctttttagcggcgaggctgacacccttgcgccgacactgctcaaactaactgacacaggcggaagcggtggtatggcaacggggattgccgtgcaaattcttgatgcgcaaagtcagcaagaaatcccgctcaatcaggtccagcctcttacgcccttaaaagccggggataacacactcaaatatcaacttcgttataagtccacaaaggcgggagcaacgggcggtaatgcgacggcggttctctattttgatctggtttaccagtgaaggagtgatgttgaaacggataatctggattctgttcttattgggattaacgtggggctgtgagctatttgcccatgatggcacggtcaacattagcggaagctttcgccgtaatacatgcgtgctggcacaggatagcaagcaaatcaatgtgcagttaggcgatgtcagcctgacacgtttttctcatgggaattatggcccggagaaatctttcatcattaatttgcaggattgcggaacagatgtcagcacggttgacgtcacctttagtggaacccccgacggagtgcagagcgaaatgttgtccattgaaagtggtacggatgcagccagcgggctggcaattgcgattctggatgatgcgaagatattgattccgcttaaccaggcgagtaaagactacagcctacatagcggtaaggtgccattaactttttatgcgcaattgcgacctgtcaatagcgatgtgcagagcggtaaagtgaatgccagcgcgacatttgtacttcattatgactaatacgtggaacagattggcgctcttgattttcgccgttttaagcctgctggtggcgggtgaattgcaggcaggagtggtggtcggcggaacgcgatttatctttccggcagacagagaaagcatatctattttactgactaataccagtcaggaatcctggcttattaacagtaaaatcaaccgcccaacgcgttgggccgggggggaagcgagcacagtgccagcaccattactggccgctccgccacttattctcctgaagcccggtacgacaggcacgttgcgcttgctgagaacggaaagcgacatcttgcctgtggatcgcgaaacgctatttgagttaagcattgccagcgtgccatccggcaaagttgaaaatcagagcgtaaaagtggcgatgcgcagcgtatttaaactgttctggcgacccgaaggtttgccgggcgacccgctggaagcttatcaacaattacgctggacacggaatagccagggtgtacaactcactaacccaacgccttattacattaacctgattcaggtgagtgtaaatggtaaagcgttaagtaatgtgggagttgtgccgcctaaaagccagcgtcagacaagctggtgtcaggcaatcgcaccgtgtcatgtcgcctggcgggcgataaatgattacggcgggttgagtgcaaagaaggagcaaaatctgccctgaaacaggttcggaaaacgtttgcgttttttttgccgcaggtcaattcccttttggtccgaactcgcacataatacgcccccggtttgcacaccgggaatccaggagagttcatgtactaccccttcgttcgtaaagcccttttccagctcgatccagagcgcgctcatgagtttacttttcagcaattacgccgtattacaggaacgccgtttgaagcactggtgcggcagaaagtgcctgcgaaacctgttaactgcatgggcctgacgtttaaaaatccgcttggtctggcagccggtcttgataaagacggggagtgcattgacgcgttaggcgcgatgggatttggaagcatcgagatcggtaccgtcacgccacgtccacagccaggtaatgacaagccgcgtctctttcgtctggtagatgccgaaggtttgatcaaccgtatgggctttaataatcttggcgttgataacctcgtagagaacgtaaaaaaggcccattatgacggcgtcctgggtattaacatcggcaaaaataaagatacgccagtggagcagggcaaagatgactatctgatttgtatggaaaaaatctatgcctatgcgggatatatcgccatcaatattagtagcccgaataccccaggattacgcacgctgcaatatggtgaagcgctggatgatctcttaaccgcgattaaaaataagcaaaatgatttgcaagcgatgcaccataaatatgtgccgatcgcagtgaagatcgcgccggatctttctgaagaagaattgatccaggttgccgatagtttagttcgccataatattgatggcgttattgcaaccaataccacactcgatcgttctcttgttcagggaatgaaaaattgcgatcaaaccggtggcttaagtggtcgtccgcttcagttaaaaagcaccgaaattattcgccgcttgagtctggaattaaacggtcgcttaccgatcatcggtgttggcggcatcgacagcgttatcgctgcgcgtgaaaagattgctgcgggtgccagtctggtgcaaatttattctggttttatttttaaaggtccgccgctgattaaagaaatcgttacccatatctaattatttcttcgaattcctctttataagataatcagggctttattttcagccctggttgttttatattcatcgctgttgcttatttagacattttgtacttttattgttgaggttattaagcgaagcgacaatggattgtgttgctgcggttttatagggtaggggagaggcagatgcgaattaaaccagacgataactggcgttggtattacgatgaagagcacgatcgaatgatgctcgatttagccaatggtatgctatttcgcagtcgttttgcgcgcaagatgttgactccagatgccttttctcccgcaggcttttgcgttgacgacgccgcgctctatttctcttttgaagaaaagtgccgcgattttaatttatctaaagaacaaaaagccgaactggtgctgaatgcactggtagcaattcgctatctcaaaccgcaaatgccgaaaagctggcattttgtttcccatggtgaaatgtgggtgcccatgccgggcgatgcggcctgcgtttggttgagcgatactcacgagcaggtcaatttgctggtcgttgaatctggcgaaaatgccgcactatgcctgctggcacaaccctgcgttgttattgcgggtcgcgcgatgcagttgggcgacgccattaaaatcatgaacgacaggctgaaaccgcaggttaatgttgacagcttcagcctcgaacaggcagtttaacgcgccaacttaagtgcagtcttcggtacacagctacagcaaagaatggtgccatcatcgcccattgcactttttttcagcggcgtgacttcgccttctaaaagctgaacacggcaacttccacaaatgcccgcgcggcaagaataagggatacgaattccctgattttctaattgctccagcaacacctgttggttatttccacgaaatgcctgtccctgccagtcaatatctacatttgcgtccggttgttgcgtgatgttggcggtatcatcagcggcagctgcgccgtaaatttttgccggagccgttgccagaatttccacctcatcgccaacgcgaatcacgccgctattacgggcaattaaattctgaccaaaatcgacatcgccgttatcctgggcagtgcggaaagattgcaatgtttttaatggttcgcctgccggatgtttttgccctttttctgggctgacggtggtgaaaatacagcggctacaaggtttaaccacatcaaacaccacatcaccaatgcgaatcactttccagcgatcttcttcccaggcactcgcgccggaaaccaccagattggggcggaattgctccatttttacactggccggacaacgttgttggagatcacgtaagctggcttcgttagcaagaaggtaaggatagccatcagcaaaactcagaggtacagtgttgtggcgtttcacgcgccgggtcatttgtggccccacccagcgtaattgcacttcgcgggagaaaaatccacttagccatttgttgatcgcgtctggcgcaattcgcgcggtaaaatgtgtgccccaaacttcggttggtgcgtcttgtgtggcgaaatcagcaaaacgaacatatgcgctactgccatctggtgcggtgagatgcaagccatcatgcacaggactaggagtaaaccgtaccatctggggaaactggcgagcggtaataaacgtaccgtcaggttccgtgatcataaagatgcgatcgaaggccagaccactgacatctgccagagcatgtgtaagaccaatgccgcgcatgcttttaacaggatgaataaaaagccggattaatgtcgccacggtgcggtcctcaaatgaaaataagccctcaactttatgacatgacgcgcttattagctataatgcgcaacaattttcttagcgcctgtcccattaggctattttatttgtcagtttggccctgggttatgctcgaaatcctcacgtacttgtgtacgctccggtttctccgcgctgtccatgtccagactgactgcaacaattacgcctactgcggtaggctcttagagtaaaagtgacgatatgaattctctgtttgccagtacggcccgtgggctggaagagctgttaaaaactgaactggaaaacctgggggccgttgaatgccaggtggttcagggtggggtccatttcaagggcgacacacggcttgtttaccagagcctgatgtggagccgcctggccagccgtattatgttgccgctgggcgagtgtaaggtttacagcgatttagacctctatctcggtgttcaggcgatcaactggacagagatgtttaatcctggcgcgaccttcgctgtccacttcagtggtttgaatgacaccatccgcaacagtcagtacggcgcgatgaaagtgaaagacgcgatcgtcgatgctttcacgcggaaaaatctgccgcgtccaaatgttgatcgcgatgcgccggatatccgcgttaacgtctggctgcataaagaaaccgccagtatcgctcttgatctgagtggtgatggtttacatctgcgtggctatcgcgatcgtgctggtattgcgccgatcaaagaaaccctggcagccgctattgtgatgcgatccggctggcagccaggaacaccgctgctcgatccgatgtgtggttccggtacgttgctgattgaagcagcgatgctggcgaccgatcgcgcaccaggcttgcaccgtgggcgttggggctttagcggctgggcgcagcatgatgaagctatctggcaggaagtgaaagcggaagcgcaaactcgcgcccgtaaaggcctggctgagtatagctctcatttttacggtagcgacagcgacgcacgggtgattcaacgtgcacgcactaacgcccgtcttgcggggattggtgaactgatcacctttgaggtgaaagatgtcgcgcaactgaccaatccgctgccgaaagggccgtacggcacagtgttgagcaacccgccatacggggaacgtctggacagcgaaccggcgctgattgcgctgcatagcctgctgggtcggatcatgaaaaaccagtttggtggctggaatctctctttgtttagtgccagcccggatctgctaagctgcttgcagctgcgtgcagacaaacagtacaaggcgaaaaacggcccgctggactgcgtacagaaaaattaccacgttgccgaaagcactccagacagcaaaccggcgatggtagcggaagactacaccaaccgcctgcgtaagaacctcaaaaaattcgagaagtgggctcgccaggaagggattgaatgttaccgcctgtatgacgccgatctgccagaatataacgttgccgttgaccgttatgccgactgggtggtggtgcaggagtatgcgccgccaaaaactattgatgctcacaaagcgcgtcagcgtctgttcgatattatcgctgcaaccattagcgtactggggattgcgccaaacaaactggtgctgaaaacccgtgaacgccagaagggcaaaaaccaataccagaaactgggcgagaagggcgagtttcttgaagttaccgaatataacgctcacttgtgggtgaacctgacggattatctcgatactggtctgttcctcgatcaccgcatcgcccgtcgtatgctcggtcagatgagcaaaggcaaagatttcctcaacctgttctcttataccggcagcgccaccgtgcatgcgggattaggcggtgcacgcagcaccaccaccgtggatatgagccgtacttatctggaatgggcagaacgcaacctgcgtctgaatggcctgaccgggcgtgcgcatcgcctgattcaggccgattgcctggcgtggctgcgtgaggcaaatgaacagttcgatctgatctttatcgatccgccaaccttctctaacagtaaacgaatggaagatgcgtttgatgttcagcgcgatcatctggcgctgatgaaagatttgaaacgtctgctgcgtgcaggtgggacgatcatgttcagcaacaacaaacgtggcttccgtatggatctcgacggcctggcaaaactgggactgaaagcacaagaaattacgcaaaaaacgctctcccaggatttcgcccgtaaccgccagatccacaactgctggctgattaccgcagcctgaaaggaatagtaatgagtttaatcagtatgcatggcgcatggctgagcttcagcgacgcgccgcttctcgataacgcagaactgcatatcgaagataacgaacgtgtttgtctggtgggccgcaacggcgcaggcaaaagcacgttaatgaaaatcctcaaccgtgaacaagggctggatgacggtcgcattatttacgagcaagatttgattgtagcgcgtctgcaacaggatccgccgcgtaacgttgagggtagcgtttatgatttcgttgccgaaggcattgaagaacaagcggaatatctgaaacgctatcacgatattagccgcctggtgatgaacgacccgagcgagaaaaatctcaacgaactggcgaaggttcaggaacagctggatcaccacaacctgtggcagctggaaaaccgcatcaacgaagtgctggcgcaactggggttagatcctaacgttgcgctgagcagcctttccggcggctggttgcgtaaagcggcattaggacgcgcgctggtgagtaatccgcgcgtgctgttgcttgatgaaccgacaaaccacctggatattgaaaccatcgactggctggaagggtttttgaaaactttcaacgggacgattattttcatctcccacgaccgtagctttatccgcaatatggcgacgcgcattgttgatctcgatcgcggcaagctggtgacctatccagggaattacgaccagtacctgctggaaaaagaagaagccctgcgcgtggaagaattacaaaatgccgagttcgatcgcaaactggcgcaggaagaggtgtggatccgccaggggatcaaagcacgccgtacccgtaatgaaggccgcgtacgcgccctgaaagcgatgcgtcgcgaacgtggtgaacgtcgcgaagtgatgggtaccgcaaagatgcaggtggaagaggccagccgctccggtaaaatcgttttcgaaatggaagacgtttgctaccaggttaacggtaagcaactggtgaaagatttttctgcccaggttctacgtggcgacaaaattgccctgattggtccgaatgggtgcggcaaaaccacgctgctaaaactgatgctcggtcagcttcaagcggacagcgggcgtattcacgttggcaccaaactggaagtggcttatttcgatcagcaccgcgcggaactggatcccgataaaacggtgatggataaccttgccgaaggtaagcaagaggtgatggttaacggcaagccacgccacgtattgggctatttgcaggactttctgttccatccgaaacgggcgatgacgccggtacgtgcgctttctggcggtgagcggaaccgcttgctgctggcgcgtttgttcctcaaaccaagcaacttattgattcttgacgaaccgaccaacgatcttgatgtcgaaacgctggaactgctggaagaactgatcgacagctatcagggcacggtattgctggttagccacgatcgtcagtttgtcgataacaccgttacagaatgttggatcttcgaaggcggcggtaaaattggtcgttatgtcggcggttatcatgatgcccgtggtcagcaagagcagtatgtggcgctcaaacagcctgcggtgaaaaaaaccgaagaagccgccgcggcaaaagcagaaactgtaaaacgcagcagtagcaaactaagctataaattgcagcgcgaactggagcagctaccgcaattgctcgaagatctggaggcgaagctggaagccctacagacgcaagtggcggatgcttccttcttcagtcagccgcatgagcagacgcaaaaagtgcttgctgatatggctgctgcagagcaggagctggagcaagcctttgaacgctgggagtatcttgaagcgttaaaaaatggtggctgatcgcaaaatagtcgatttaaacagagacagctgacaacggtaaaattgcctgatgaactgggtttatcaggcatgaaaaccaacactttgttagtcatctgtaaaatagcgcatcattaaggagtaccaatgtgcgaacatcatcatgccgcgaagcacatcctgtgcagccagtgtgacatgctggtggcgttaccgcgccttgagcatggtcagaaagcggcatgtccccggtgtggcacaacgttaaccgtggcgtgggatgcccctcggcagcgtcccaccgcctatgcgttggctgcactgttcatgctgttgctgtccaacttgtttccttttgtgaatatgaacgttgcaggagttaccagtgaaattacattactggaaattcccggcgtgcttttttctgaggactacgccagcctcggcacctttttcctgttgtttgtgcaactggttcccgcgttttgtctgataaccattctgttactggtgaatcgcgcggaattaccggtccgtttaaaagagcaactggcacgggtgctttttcaactcaaaacctggggaatggcggagattttcctcgcgggtgtgctggtcagtttcgttaaactgatggcttacggcagcattggggtaggcagcagctttctcccctggtgtttattttgtgtcctgcaactgcgcgcttttcagtgcgttgatcgtcgctggttatgggacgacatcgccccgatgccagaactgcgccagccgctaaaaccaggcgtcacggggatacgtcaggggctgcgtagctgctcctgttgtacggcaatccttcctgctgatgaacccgtgtgcccgcgttgtagtaccaaagggtacgttcggcgtagaaacagcctgcagtggacactcgcgctgcttgtaacgtccatcatgctgtatcttccggctaatattttgcccatcatggtgacggatttattaggcagcaagatgccgagcacgattctcgctggggtcattctgttatggagcgaaggctcttatcccgtcgctgcggtgatctttctggccagtattatggtgccaacgttaaagatgatcgccatcgcgtggctgtgttgggatgccaaagggcatggcaagcgcgacagtgaaagaatgcatttgatttatgaagttgttgagtttgtaggccgctggagcatgattgacgttttcgttatcgcggtgctcagcgcgctggtgcgtatgggaggtttaatgagtatttatccggcaatgggtgcattaatgtttgctttagtcgtcataatgacaatgttttctgctatgacgtttgacccgcgtttgagctgggatcgtcaacctgaaagtgagcatgaggagtcctgacagtatggaatctaataatggggaagccaaaatccagaaagtgaagaactggtctcccgtgtggatatttcctatcgtcacggcgctcattggggcctgggttcttttttatcattacagccatcagggaccggaagtgaccctgatcaccgcgaatgcggaaggaattgaaggtggcaaaaccaccattaaaagccgtagcgttgacgtcggcgtggttgaaagcgccacactggctgatgatttgacgcacgttgaaatcaaagcgcggctgaattccggtatggaaaaattgctgcataaagacaccgtcttttgggtggtgaaaccgcagattggtcgcgaagggattagcggcctgggaacgctgctgtctggagtttatatcgaactgcagccaggcgcgaaaggcagcaaaatggataaatacgatttgctggacagcccaccgttggccccgcctgatgcgaaaggtatccgtgtgattctcgatagcaaaaaagccgggcagctcagcccaggagatccggtgctgttccgtggctatcgggtaggtagcgttgaaaccagcaccttcgatacacaaaaacgcaatatcagctatcaactgttcatcaatgcaccttatgaccgactggtgaccaacaatgttcgcttctggaaagatagtggcattgcggttgatctgacgagtgcagggatgcgtgtggagatgggcagtttgacaacgctgctgagtggcggtgtcagctttgatgtgccggaaggtctggatttagggcagccagtggcaccgaaaacagctttcgttttgtatgatgatcagaagagcattcaggatagcttgtacaccgatcacattgattatctgatgttctttaaagatagcgtacgcggtctgcaaccgggagctccggtagagttccggggtattcgcctgggtaccgtaagcaaagtgccattctttgcgccgaatatgcgtcagacatttaacgatgattaccgtattccggtactgattcgtatcgagccagagcggctgaaaatgcagcttggcgaaaatgcggatgttgttgagcaccttggcgaattgttgaaacgtggtttacgcggaagcctgaaaaccggaaacctggtcactggtgcactgtatgttgatctcgatttctatccaaatacgcctgcaataaccggtattcgtgaatttaatggttatcagattatcccgaccgttagcggcggcctggcgcaaatccagcaacgactgatggaagcgttggataagatcaacaaactgccattgaatccgatgattgaacaggcaaccagtacgctttctgaaagtcagcgcacaatgaaaaacctgcaaacgacgctggatagcatgaacaagatcctcgctagccagagcatgcagcagttgccgacggatatgcagagtacgttgcgtgaattgaatcgcagcatgcagggcttccagcctggctccgcagcctacaacaagatggtggcggatatgcagcgccttgatcaggtgttgcgagaactgcaaccggtgctgaaaacgctcaatgagaagagtaacgcgctggtatttgaagcgaaggacaaaaaagatccagagccgaagagggcgaaacaatgaaaaagtggctagtgacgattgcagcactgtggctggccggatgcagctccggcgaaattaataaaaactattaccagttacctgtggtgcagagcggtacacaaagtaccgccagccagggcaatcgtctgttatgggtagagcaggtcactgttcctgactatctggcggggaatggtgtggtttatcaaaccagtgatgtgaagtatgtgattgccaacaacaacttgtgggccagcccgttggatcaacagttgcgcaacaccctggttgccaacctgagtacgcaactgcccggctgggtggttgcctcccagcctctgggaagcgcccaggacacgctcaatgttaccgtaacggagtttaacggtcgctatgatggcaaggtcattgtcagtggtgagtggctgttgaaccaccagggacaactgatcaaacgtccgttccgtctggaaggagtgcaaactcaggatggttacgatgagatggttaaagtgctggccggtgtctggagtcaggaagccgcttctattgcacaagagataaagcgtctaccttaattataaagatttgtaaatataaccgtctccggtatgttgcctgaggcggtttttttgtctctaacgtgcggaaaaatttgttcctcttcacattttttgtacaaccgacatgcccgtgtagctcacaaatatgacagtggcgtgaattttgcgcattgacggcagttatgattcgcggtattgcttaactgtgattgcacatttagtaatcactgttttcttttccaccagaaaccagtatgagggaaacgaggcatgaagagacaaaaacgagatcgcctggaacgggcacatcaacgtggttatcaggccggcatcgccggacgcagtaaagaaatgtgtccctatcagacgctgaatcaaaggagtcaatggctgggaggctggcgagaagccatggcggacagggtagtaatggcctgattctgtctctttaaaaagaaacctccgcattgcggaggtttcgccttttgatactctgtctgattataatcagaaggcagacgtatcctggaacagaccgactttcaggtcgctggcggtatagatcagacgaccatcaaccagcacttcgccatccgccaggcccataatcagacgacggttaacaatgcgtttaaagtgaatacggtaggtcacttttttcgctgtcggcagtacctgaccagtgaatttcacttcgccaacgcccagcgcgcggcctttaccttcgccgcccagccagccgaggtagaaccctaccagctgccacattgcgtccaggcccaggcatcccggcataaccggatcgccaataaagtggcatccgaagaaccacagatccggattgatatccagttctgcttcaacataccctttgtcgaagttaccacccgtttcggtcattttgaccacacggtccatcatcagcatgttcggtgctggcaattgcgggcctttagcgccaaacagttcaccgcgaccagaggcaagaaggtcttcttttgtataggattcgcgtttatctaccatgttctctgtaagccttattttattgaagcacgcaggatagctaacacgtgtacgctgaacaagtccgatcagttcggaataaaccagttcagccaacgtaatggccatggaaaacggtgacgtccttcctgttggcttgcttgcgcgatacgttcctggatggtttgcatcagcgtcgtttggccttcgccatcccacaccagatttaataataacggcagtgcgtcagtcacatcgtctactgcccagatggtgaatttgccttcttctaccgctttcaccagttcactgtgaagacttaaatggcgaacgttagctgtggggataatgacaccttgtttcccggttaactcacgttgctggcaaatagcaaagaagccttcgattttctcatttaaaccaccgaccggctgggcgcgaccgaactgatcgacactacctgtgatagcgatactctgattcaccggcacatcggcgagggcgcttatcagggcgcagagttcagccatgctggcactatctccatcaacttcactgtaactctgctcaaatgtcaggcttgcactgaaggggatctgttgctcaagctgtagttcgctcatcaggaacgcttgcatgatcatcatccctttcgcatggatattgccgccaagctccgctttgcgttcgatgtcggtgaattcaccatcgccaatatgcacaacgcagctaatgcgagaaggttcgccaaaagcgcgtggatgacccggaaattcaatgacgctaagggcgttaatttgcccgatgcgttcgccttcggtttcaatcaggatttgctcctgaaggatctcatcctgcatacgttcagcgaggaaaccttcgcgccattcacgctgctgcagcattaagtttagctgctcgccggagaaggtgtcgccatcacacagggaggcgacctctttacactggcggaggatccactgcgggctaagcggaagtgtttcttgttcaccggtgtagcgtgctgcttcgcggataagtatcggccaggcatccgctcccggtgcaggtaagtgattatgtctggcggtaaatgtcacccagcgacaccactgggttacactctccgcatcgacaatctgcagagtatcttcaaattcgctataaatagcctgctcactaagctctggctccatctcctggaaatcagccaaactttcgcgttcgcctaccagaatgactttcagcttcaatggcatgctaggcacagagacggggagagggcggctctcatcaaacgcaacccagtcaaaacgctcgcggttaacgatatttttcagccgcatccacagcagaggttgcgccagcagtgtacgcaaagagataatgagaataccgccatttgcctgatgcaccagaccaggctgcagggtaatgtcgccattaaactggcgcaggcagccaaagagttgctccgcttctacccagtcggcagcgacaacttgcgttaaagtcgcaaaattatcatctgcactcactgcgtgacgtaagcggatggagtggccggaaacctcatagtgaccgcccaccagttggcctgcatcgctttgtagcgtacgcgcggcattggcaataagattcagatactcagactcttccggggccttcgccagcataaaagaggaggatgctcgcgtatgcagcaactgctccagcgcaaattgcagccgcggttgagtatcactgaataaaggatcgttttcgtcaatcaaatgtggctgagcaaatatttcctgatagctatcggtatcaggaaccaggtcacgccatgcaagtttcgtaatggtcaaagttgatgttttttagtctgttgtcaaagccgcgattataccgtaaccggcactacagcacacgtagaaagcaccgacaatactcctggcatgggcgttaaagctcacaggatggagattcttttcttcactggcctaaaaagctgatattctgtaaagagttacacggtaacattgagatcgctatgaaatatcaacaacttgaaaatcttgaaagcggttggaaatggaagtatctggttaagaagcatcgcgaaggggagttaatcacccgttacatagaagccagtgccgcccaggaagccgtcgatgtgttgctcagcctggaaaatgaacccgtgctggtaaatggctggattgacaagcatatgaatccggaactggtcaatcgcatgaagcaaaccattcgggcaagacgaaagcgccattttaatgcggaacaccagcatacgcgcaaaaaaagcatcgatctggaatttattgtctggcaacgtctggctggtcttgcgcagcgtcgcggtaaaacgctttctgaaacgattgttcagctgattgaagatgcggaaaacaaagagaaatacgcgaataaaatgtcttctctgaagcaggatctgcaggcattgctgggtaaggaataactgacgaaagtcagttcaatttactaaaggcaaaaaaaaccccgcagcagcggggtttttctaccagacgagaacttaagcctgcggctgagttacaacgtctttgatacctttaacttcgatctctacgcgacgatccggagccaggcagtcgatcagtgcagcacgctgtttcacgttgtcacaggtgttgccagtaaccgggttggattcgcccataccacgtgcggagatcttgtctgccgggatacctttggagatcaggtaatcaacaacagactgagcacggcgctcggacagaccctggttgtaagcgtcagaaccgatgcggtcggtgtaacccagaacaactacggaaccgtctttcggatccaggttgctcagctggctgtacagctgatccagagcagcctgaccttccggtttcagggttgctttgttgaagttgaacagaacgtcagacttcagagtgaagtgcttggtctgtacttccggtgccggagctggagccggagcaactactggagctgcttcgccctgaccgaaacggtaggaaacacccaggctcagcatgccgttgtccggacgagtgccgatggtgtgtgcgtcaccgatgttgttggtccactggtattccagacgggtagcgatttcaggagtgatcgcgtactcaacaccgccagcgaagaccggagaaacgccggtgtcgtggtttttaccataaacgttggatttagtgtctgcacgccataccatgccacccagacgagtgtagatgtccaggtcgtcagtgattgggtaacccagtttagcggtcagttgaacgccctgagctttgtatgcaccgttttcaacgctgcctttgtacggcatacgacctaaccagtcgtaacccatttcaaagccaacatacgggttaacctggtaaccaccaaaagcaccagcgcccagttggttttcatgggtcgggccattgttgttgatgaaaccagtgtcatggtactgggaccagcccagtttagcaccagtgtaccaggtgttatctttcggagcggcctgcgctacggtagcgaaaccagccagtgccactgcaatcgcgatagctgtctttttcattttttgcgcctcgttatcatccaaaatacgccatgaatatctccaacgagataacacggttaaatccttcaccgggggatctgctcaatattaactctaccgatatcttcggcttatgccgagcacccctggcgatgtaaagtctacaacgtagttgaaaacttacaagtgtgaactccgtcaggcatatgaaaaaaaagtcttgtataaggtatgtttaatcttttttgtcagcgacaatttacagaagagaatcgcggaaaccgcttcagacaagcctccgcaaggaaaattagtcacgactgaaagcattggctgggcgacaaaaaaagttccaggattaatcctaaatttacttaatgatacaaattagagtgaatttttagcccggaaagttgtctcgtggcgtgagaggatgcgcttaccggacgcataataaaccccatagcgttaccttcatttgccgcatcaacaagttcagcatgctcttcttcagtcaaatcatctgccaaccaaccgatcaccacactgtaattgcccgtgcgtaaagcgcgaaccatactctccacagtgtggcaaggggagagctggctaatctgcattactttcgttaagggtagcccagatgcctgaacccattcccgactcagtttttgttgcggtgttaaccagagttgccagcggctttgctgaccgagttgctgtaacaatggcaacagtagaagttgcgtcatcatgggctgatcttcgcgatagacaacttcactgataagcccggctgtagtgttttccgtagagacacgcgcaattttacttgctgcggaactgaagctgctagaacgatgtgcatagccactagtgtacataatcaatccagcccctgtgagttactgtatggatgtacagtacatccagtgacaacaaagatcaaccctattttcggaaagagcctcgcaaattttgtcgttggtgacgggaaaacataaattaatcttgccccttaagaataagttgcctattttcgtagttaacggatccgttaatgtgaatcattcttttatgttatgattttaaaaggaattttatgaaaagcctctcctataagcggatctataaaagtcaagaatacctggcaacgttgggcacaattgaataccgaagtttgtttggcagttacagcctgaccgttgacgacacggtgtttgcgatggtttctgatggtgagttgtatcttcgggcttgtgagcaaagtgcacagtactgtgtaaaacatccgcctgtctggctgacatataaaaagtgtggccgatccgttaccctcaattactatcgggttgatgaaagtctatggcgaaatcaactgaagctggtgcgtctgagcaaatattctctcgatgcagcgctgaaagagaaaagcacgcgcaatacccgggaaagactgaaagatttgcccaatatgtcttttcatctggaagcgattctcggggaggtggggattaaggatgtacgggcgttacgtatacttggggcaaaaatgtgttggttgcgactgcggcagcaaaacagtctggtgacagaaaagattctgtttatgcttgaaggtgccattatcggcattcatgaagctgcgctcccggtggcacgccgccaggagcttgcagaatgggctgactctcttacgccgaaacaggagtttcctgcggaacttgagtaattacgcgctaacaggagtttcctgcggaacttgagtaatctggcgttgcagacgaccaatctcaggcagtaatgcaatcaataatccaacttgttgtacgaccagaggttctttgctgtctgcccgtggttcaagttgctgcatccgctgtttcaggctagctaatgcctcattgacgcgttcttcatcagcaggttgatgatgtaacgcgtcatcaacatagcaaactgcgtcatcaagaaacgccagaatttcaggattagttaactgctcccggtgagcaccgagggcactgatatagctggtaaacgtatggttaaggcacagcaaccgaaacgcggcttcgcgaatttgcggggtaacgttcggctcgctggacatattacttaccacgctcgccagctcagcatcacggttgtgtgcatcgcggcgggcaatacgatacgccagacggttatcacgcccctgatggtattgctccagtatggcatcgagataccgacagttggcctctgtggcgcgttcgagcatgcgcggcagattgcgaaactgccagtcaggccagatgtagctcactgccgcccacgcaatggcacaaccaatcagcgtatcgattacgcgaggtaacgctacttcaaaaccttcacccagtaagttaaaacacagtagcaccaaaagtgtgatgaacatcgttgcatgagcgtattgcacgttacggaaggcaaaaaagagcacgccggtaataaccagcagcaccagctgcccttccagacttggcacaaaccacagcacaggaatgccaatggcgatacctaccagcgtaccaataatccttaacttcaggcggtggcgcgtggcgttatagtttggctggcagacaaacaaacttgtcagcaagatccaatacccgtgatgcattccggttatctgaatgatggcgtagccgaagcacaacaccaggctcattcttaccgcatgacggaagagggcggattccggcgtgaagtgacggctaagacgcagccagatatcactcaacccgtgcgggctgtcatcagcgagctcattttcgtcattattatggggtagtgcctgggcctgttcactttcaattgttgccagttgggcatcaatggcgcgtaaattgttcagcaaaaatcccagtgttttgagtaaatcggcgggtgcgccgttatcgcgcatccgctccagcgcagcatcaatatgcgtaaaagcgcgctcaaaatgcggatcatgttgataaggctgacgcaacaaaatacagcgactcagttgctggcacgcctggccctgcatgctcatcagccgctgaaaacggaacagcacgtcgctgtggcgaaaatgttcacgcaatgtttgatactgaatatgagaagagctggcacgctcgtgaatatcctgtgcgacaaagtaataatgcagcgtgcgacgcgttccccgttgaccacgatcgccacgtaagcgggtcagcaggctgagtttcgtctgattcaatgtcgccatcagcagaccgttggcgagagccaaatcgtacagcggtgcctggctttgatcttcaatatcaggatcaaacatgcggctcttgagctcaagataacgcgccagttgttcatagcaacgcgccaggttgtcctgcagcgggcggaccgggaacagcagatgaccaataagtgtcaggacgttgtaccagacggcaccggccagcagatacatcggctgctgataccagtgctcatacagacttgttcccaacatagtgtaaatggcgatcagcaatgcaccgaaggcaattgttgcatagcgttgacccagaccgccgagcaaaatgaagccgctggtagagagcgttaagccaatcgcaaatagccagggccagggaaacagcaattctacactggcgctggcgataaaaaagcagaacagcgtaatgatgaggttacgcaaacgtcccgccagtcggtcatcgagatcggtcagcgccgctgccaccatccccagcgttagcggaatcgtcagttttacatcacccagccaccacggaaacgctgtggttccacaaagcgcaataaaaatacgcgcgtaatacagccaggcgctgttccaggtatagcgtttgagcaaaggacttagcataaaggccatattagtggattattcaaaacgacgacgtgcattggcttcacgcgcagcttgcgctgtttctacgcttaccacgcgacgaccaaccggccatagtgcaatagcggcaattttaaagttcgcaatgccgacaggaatgccaatgatactaatacattgtgcgatgcccgttgcaatgtgcatcaggcataaccaccagccaaagaaaatcagccagaaaatattcaataccgtaccgccagtattcagcagcacatttttgccagccgggttcagttcatcgacatgaatagcttcattgccataaggcaccagagacagtttagtgatctcccagcaggatcgtgtcagcggtaaggtaaaaatcagcacaatactgaccagagtcgccaacagccagcccagagtggtggcaaatccgccaagcacaaagttcagaatgttcaaaacggtacgcataaaacctcgctttactgtggttttcagtaatgggcggcaattgtaacgtttttttgggctggagcacgttttctctgacggttacactgataagaaataatttcgtgtggatctacagagtcatggaactgaaagcgacaacgcttggaaaacgtctggcacagcacccttacgatcgggcggtgatcctcaatgccgggattaaagtctccggcgatcgccacgaataccttattcctttcaatcaattactggcgattcactgtaagcgcggtctggtatggggcgagctggaatttgtactgccggacgaaaaagtggtgcgtctgcacggcaccgaatggggcgagacgcagcgtttttaccatcatcttgatgctcactggcggcggtggagtggcgagatgagcgaaattgcgtctggtgttttacgccagcaactggatttgattgccacgcgcactggggaaaataaatggctgacgcgtgagcaaacctctggcgtgcagcaacaaatccgccaggctttgagcgcgttgccgttgccggttaaccgactggaagaattcgataactgccgtgaggcgtggcgtaaatgtcaggcctggttgaaagatattgaaagcgctcggttgcagcataaccaggcgtataccgaagccatgcttaccgagtatgcggattttttccgccaggtcgagtctagtccgctgaatccggcgcaggcccgggcagtcgttaatggcgagcattctctgttagtgctggcaggtgcaggaagcggaaaaacgagcgtgctggtggcccgtgcaggctggttgctggcgcgtggtgaagcgtcccctgagcaaattttattgctggcgtttggtcgcaaagccgctgaagagatggacgagcggattcgcgaacggctacataccgaagacattaccgcacgcacgtttcatgcgctggcgctgcatattattcagcagggcagcaaaaaagttccgatagtcagcaaactggaaaatgataccgctgcccgtcatgaactctttattgctgagtggcgcaagcaatgcagcgaaaagaaagcgcaggcgaagggctggcggcaatggctgacggaagaaatgcagtggagtgtgccagaaggtaacttctgggatgatgaaaaattacagcgtcgccttgcctctcgcctcgatcgctgggtaagtctgatgcggatgcacggtggtgcacaggcagaaatgattgccagtgcacccgaagagattcgcgatctgttcagtaaacgtatcaagttgatggccccgttattaaaagcctggaaaggtgcgctgaaggcagaaaacgctgtcgattttagcggccttattcatcaggcgattgtgattctggagaaaggtcgctttatcagcccgtggaagcatattctggttgatgaatttcaggatatcagcccgcagcgggcagcgttgttagcggcattacgcaagcaaaacagtcagacgacgttgttcgctgttggtgatgactggcaggcgatttaccgattcagcggtgcgcaaatgagcctcaccaccgctttccatgaaaactttggtgaaggcgaacgctgtgatttagacacgacttaccgttttaacagtcgtatcggtgaggtggcaaaccggtttattcagcagaacccaggccagctgaaaaagccgctaaacagcttaaccaatggagacaaaaaagccgtcacgttattggatgagagtcaacttgacgctttgctggataagctctctggttatgccaaaccggaagagcgcattctgatcctggcgcgttaccatcacatgaggcctgccagcctggaaaaagcggcaacacgctggccgaagttgcaaatcgactttatgaccattcatgccagcaaagggcaacaggcggattacgtcatcatcgttggcttgcaggagggaagtgatggttttccggctgcggcgcgggagagcattatggaagaggcgctactgccaccggttgaggatttcccggacgctgaagaacggcggttaatgtacgtggcgctgacccgggcacgccatcgggtatgggcactgtttaacaaagagaatccctctccctttgtggaaatactgaaaaatctggatgtgccggtggcgagaaaaccgtaagaaacaggtggcgtttgccacctgtgcaatattacttcagacggtccgcgagataacgctgataatcggggatcagaatatcgaccgcgtcgttgaaatgcgggctctggattatgaagtctgccgttgccacgttggtggcgaccggaatgttccataccgtcgccagacgcagcaaggctttcacgtcaggatcgtgcggcacggcatttagtggatcccagaagaaaatcaatacatcaattttcccttcactgatcaatgcgccaacctgctggtcaccccccattgggccactcaacatcgcgttgacgttcatgccggtcgcgcgggaaattaagttaccggtagtgcctgttgcatacagtacgtgttgttccagtaacggttgatgccgttccacccagctcatcagcatttgtttgcagtgatcgtgtgccaccagcgcaatatgtttccgcgcaggtaaagtgcgagtcgtcagttccataatgtacatccgtagttaactttcctacagattactgtaagcacttatcgctgcaagataaagaccgaaaaagcctgcgcacaggcacaaaaatctcaggaagatggttgtttttccgcccactgcaggaaagtatttcgcgtttgtgggtcagccagtttaaaccaatacttcagccgttgttctgtgagcacctgagactgcggtggaatagcatccagctcggaaacaccgctaagcagcgtactgtcatctgccatcatcgtggcaaattgcggtagactagcgcgtttcgcggatttgttatagcgttcaacctcgacctcataatcaatcgtttttgccgtactggtaatggcgagaatatccagctttaccggaatcggcgtcgcatcgccatccaacaattcaaggcgcggcgcggcatcaaaatggttagcttcccgctcattctccaggcgaggcaggcgaaaattgacctggttgatgagctgggtattaaaactgaccaccagcggtggggagatatacagccgttcttcactattggaaagatgaatcgtcttctcaacgcgaaacactaactgatgcggtccattatccagttcaatgctgtccgcaccgcgcagcagagagctggaaaccttcttgccgtcgagtaccagaagatcgacatcggtactaagccgcagcgtggtggcaaaaacggataccggcaaacataatgcaatcaaggtggtcacgatgccggttttcataggtagctcctgtcaaaagaccgcccgaataataatgtgtcaaaatttttctttaatcatacttactaacatatagacatatttcccgcttttgctctcattcattcgtattagctgcatggttggcatgtcggctttgtcgtacactttgttaaacagtctggaggaaataatgaaagaaaccgatattgcaggcattttaacgtccactcacaccattgcgctggtgggggcaagcgacaaacccgatcgtcccagctatcgcgtgatgaaatatctactcgaccaggggtatcacgtcattccggttagcccaaaagttgccggcaaaacgctgctgggccagaaggggtatggcacgctggcagacgttccggaaaaagtcgatatggtcgatgttttccgtaatagtgaagcggcgtggggcgtggcacaggaagctattgccattggcgcgaaaactctctggatgcaactgggggtgattaatgagcaagcggcagtactggcacgggatgccgggttaaatgtggtgatggatcgctgcccggctattgagatccctcgcctgggcctggccaaataaaaaatccccggaaggcaaaaaccttccggggatttgttcagggattagttacgcagacgcggggcctggagttgtttgcggatggtctgcgccagctcatccatggatggctgttcaggatgttcatcctgcaattcgctacttagctgggcttcagccaggtaggtatgaaccggtaggccgttatcgtcctccatcactacgtgataccacggagcggcgcgaagctcgtcattcaccgccagctcatcagggctcggttcagagaggctataaaccgggtcgatatccacgaccactccgagataacctaacagggaatggcggacctgctggccgataccgaatttgctggcaatcatagtcacctcccgggaaatctttacctttgatataagggtaaaattccacatttcaagttacatgacgcgacaggcaaaccctttcagatatagcccttccggataggtagcgatcaccggatgatcggctgcctgacggaactgctctataaattgtacatcacgaccggcatcaattgcggcatccgcgatgattttctgaaataaatcgctggtcatcagaccggaacaggagaaagtcaggagaataccgccttcattcagcagctgaatcgccagcatgttgatgtctttataaccacgacacgcgcccatcaactggcttttattctcaacaaacttcggcgggtccatcacgataacgtcaaatttttcaccgcgatcgcgataagtacgcagcaatttaaagacatcatcacggacaaactcagccttgctcagatccagtttgttcagctcaacgttctgccgtgcaatatccagcgcttcctgggaggtatcaacgctgacaacctggctgcaaccgcccatcagtgcgcttacggcgaaaccaccggtataggagaaacagttcagcacacgtttattttcaacgtagcggcgggtagccaggcggctatcacgctggtccaggtagtagcccgttttgtgtccgtgctgaatatccaccagcagtttcattccgtgttcttcaatcggcagcagggcaggtggcaactcgccggtgacggggccctgggtcagctccattccttcttttttacgtaccgcgacgtcgctgcgatcgtaaatgctacattccgggtacagcgtttgcagggcactaattaatgccgcgcgctgatattctgccccagcactcagcagttgcagcaccagaaaattaccgaaacgatcgatagtaatacccggcaggccatcagattctccggcgattaaacgatagctgtcgaggccatctttttgcgccagccagtcacgccatttttgtgcttgttgcaaacggcgggaaaaaaaagcaatgtcgatagactcagacgggtcaaacgtccagacgcgcgcccggatttggctagctgggctataagcgccgcgtgctaaccattttccctgatgatcaacaatatcgatggtttcaccgaggctggctttaccttccatgcgggcaacggccccggaaaagacccacggatggcgacgaagtaatgatttttcgcgccctttggctaacactaaacgtacactcataatttacttttctgtcgatgcaaagaaatgggcgtcattgtccggagttttccatggatttgcaacgcgtccattaaggataaggagagcagcaatgagcaaagtctgcataattgcctgggtttacgggcgagttcagggcgtaggatttcgctacaccacacagtacgaagcgaaaagactgggtttaaccgggtacgccaaaaatcttgacgatggcagcgtggaagtggttgcttgcggtgaagaagggcaggtggaaaaattaatgcagtggttaaagagtggcggcccgcgttctgcgcgtgtagaacgggtgctcagcgagccgcatcatcccagcggggaattaaccgattttcgtatccgttaaatacattttaccggttttggcaggccagcaattttggtggcttgcttagccggacctttcggaaacagtcggtataaatagcggctgttacctttttcttcgccaaatttattcgccatcgcttttaccagcatacgaatcgccggagaagtattgaattccagatagaaatcacgcacaaaacgcaccacttcccagtgttccggactcaggctaatcccttcgttctctgcaatcaccacagccagcggctcactccactggctgctttctttgagatagccttcggtatccgtttctatctctttaccttcgaagatcagcataattattactaccttaatcagactggcggcagtgtaacaaaaaacaaagccccgcataaagcgaggctatgaaagtgttagcgggtgagattaatcgcggctagcgaagcccagaatgctcagcaggctgacgaagatgttgtacaggctaacatacaggctaaccgtggcacgaatatagttcgtctcaccgccatgaatgatgttgctggtttcaaacaagatagcgccagaggagatcagaatgaagaccgcgctgatcgccagatgcagagcaggcagctgcaggaagatattcgcaaccataccaatcagcaccaccacaatacccgccatcagcataccgccgaggaagctcatatctttgcgggtggtcagcacatatgcagagcagcagaagaacactaacgccgttccgcccagtgccatagcgattacgtcacccattccggcagacagataggtgttcagaataggtccgaggatataacccagaaaaccggtaaaggcgaatgcggagataatcccggtcggcttattcgccgttttataggtcaggaacatcaaaccatacatacccaccagcgtcagaatcagacccggagatggcagcatcagcaccgtactggcagttgcggtaatcgcgctaaaggccagcgtcaggctcagcagaaaataggtattacgcagcaccttatgggtgctaagcagacttgtacggtcatgactagaactaacaatacgatccattgagtcactctctatgacagatgtaattaattaagcagcataatgataatgcgtaagggcacccagaagttttacccatctttacgcatttgatctggaacaggtttaacagcggattatcaggtcattaagcaaatataacgccctgagaatttcgacaggcaaaagaaaaaggggttagcatttagctaaccccttatcttatttggcggaagcgcagagattcgaactctggaaccctttcgggtcgccggttttcaagaccggtgccttcaaccgctcggccacacttccggaatgacgcgcactataaacatcccgatgcggcgtgtaaacccctaatttgtttgtttgcctgaaaaacagccaaaagtgcattgatagcgtgaaataacagcagattgatcatttcatcaccatgaattccttctcttttactcgtttagcaaccggctaaacatccccaccgcccggccaaaagaaaaataggtccatttttatcgctaaaagataaatccacacagtttgtattgttttgtgcaaaagtttcactacgctttattaacaatactttctggcgacgtgcgccagtgcagaaggatgagctttcgttttcagcatctcacgtgaagcgatggtttgccttgctacagggacgtcgcttgccgaccataagcgcccggtgtcctgccggtgtcgcaaggaggagagacgtgcgatatgaataacgaggaaacattttaccaggccatgcggcgtcagggcgttacccggcgcagctttctcaaatattgtagtctggctgccacgagcctgggattaggcgcgggaatggcaccaaagattgcctgggcgctggagaacaaaccgcgcattccggtggtatggatccacggtctggaatgcacctgctgtaccgaatcttttatccgctccgctcacccactggcgaaggacgtcatcctttccctgatttccctcgattacgacgatactttgatggctgccgccggaacccaggcggaagaagtctttgaagacatcatcacgcaatacaatggcaaatatatcctcgcagtagaaggtaatccgccgctgggcgagcaggggatgttctgtatcagcagcggtcgaccgtttattgagaaactcaaacgtgccgctgccggagccagcgcgattatcgcctggggaacctgcgcgtcctggggctgcgtgcaggccgcgcgacccaatccgacgcaggcaacgcctatcgacaaagtcatcaccgacaaacccattatcaaagtacctggctgcccgccgatcccggatgtgatgagcgccatcattacttacatggtgacctttgatcgcttgccagatgtcgacagaatgggccgtccgctgatgttctatggtcagcgaatccacgataaatgctatcgccgcgcccacttcgacgccggagagttcgtccagagttgggatgatgacgctgcccgcaaaggttactgcctgtacaaaatgggctgcaaagggcctaccacctataacgcctgttcctccacacgctggaatgatggcgtttctttcccaatccagtctggtcacggctgcctgggctgtgcggaaaatggtttctgggatcgcggtagcttctacagccgcgtggtcgatattccgcaaatgggtactcattccaccgccgataccgtcggtttaaccgcgcttggcgtggtggcagcggctgttggtgtgcacgcagtcgccagcgccgttgaccagcgcagacgtcataaccagcaacctacagaaaccgaacatcagccaggcaatgaggataaacaggcatgagcactcagtacgaaactcagggatacaccatcaataatgccggacgccgcctggtggtcgacccgattacgcgcatcgaaggccacatgcgctgcgaagtgaatattaacgatcagaatgtgatcaccaatgccgtctcctgcggcaccatgtttcgcgggctggagatcatcctacaagggcgcgacccgcgcgatgcgtgggcgttcgttgaacgtatctgcggcgtctgtactggcgtacacgccctggctagcgtttacgccatcgaagatgctatcggtattaaagtgccggacaacgccaatatcatccgcaacattatgctggcaacgctctggtgccacgatcatctggtgcacttctatcagcttgccgggatggactggatcgatgtgttagatgcgctgaaagccgacccgcggaaaacctccgaactggcgcaaagtctctcctcttggccgaaaagttcccctggctatttcttcgacgtacaaaaccgcctgaaaaaatttgttgaaggcgggcagttggggatcttccgcaatggctactgggggcacccgcagtacaaactgccgccagaagctaacctgatgggctttgcccactatctcgaagctctcgatttccagcgtgaaattgtcaaaatccacgcggtctttggcggtaaaaacccgcatccaaactggattgtcggcgggatgccttgcgccatcaacattgacgaaagcggcgcggtcggggcagtcaatatggaacgcctgaacctggtgcagagtattatcacccgcacggcggacttcattaacaacgtgatgatccccgacgccttagccatcggtcagttcaacaaaccgtggagcgaaatcggcactggtctttctgataaatgcgttctcagctacggcgcattcccggatattgccaacgactttggcgagaaaagtctgctgatgcctggcggcgcggtgattaacggcgacttcaacaatgtgctgccagtggatttggttgatccgcagcaggtgcaggagtttgtcgaccacgcctggtatcgatatcccaacgatcaggtcgggcgtcatccgttcgatggcatcaccgacccgtggtacaaccccggcgatgtcaaaggcagcgataccaacattcagcagctgaatgaacaggaacgctacagctggatcaaagcgccacgctggcgcggtaacgcgatggaagtggggccgctggcgcgcacgttaatcgcttatcacaaaggcgatgctgcgaccgttgagagcgtcgatcgcatgatgagcgcgttgaacctgccgctttccggtatccagagtacgttaggccgcattttgtgccgcgcgcacgaagcgcagtgggccgcaggtaagttgcagtatttcttcgacaagctgatgaccaacctgaaaaacggcaatctcgccactgcttccacggaaaaatgggaacctgcaacctggccgacagagtgccgtggtgtcggttttaccgaagcgccgcgcggggcgttaggccactgggccgccattcgcgatggcaagattgatctctaccagtgcgtggtgccgaccacctggaacgccagcccgcgcgatcccaaagggcagattggcgcttatgaagcggcgctgatgaacaccaaaatggcgatccccgagcaaccgctggagatcctgcgtactctgcacagctttgacccgtgcctcgcctgtagtacacacgtgctgggcgacgacggtagcgagctgatctccgtgcaggtgcgttaacagcgaaggagaatcatcatgcaacagaaaagcgacaacgttgtcagccactatgtctttgaagcgccagtgcgcatctggcactggttgacggtgttatgcatggcggtgttgatggtcaccggatactttatcggcaagccgctaccttccgtcagcggcgaggcgacgtatctgttctatatgggctacatcaggttaattcacttcagcgccgggatggtttttaccgtggttttgctgatgcggatctactgggcttttgttggcaatcgatactcccgcgagctgtttatcgtgccggtatggcgtaaaagctggtggcagggcgtgtggtatgaaatccgctggtatctgtttctggcaaaacgtccgagtgccgatataggccataatcccatcgcccaggcggcgatgttcggctatttcctgatgagcgtctttatgatcatcactggttttgcgctgtacagcgaacacagccagtacgctatttttgcgccgttccgttatgtggtggaatttttctactggacgggtggcaacagtatggacattcacagctggcatcggctggggatgtggctgattggcgcgtttgtgatcggtcatgtctacatggcgctgcgtgaagacatcatgtccgacgacacggtgatctccaccatggtcaacggctaccgtagccacaaatttggcaaaataagtaacaaggagcgtagttgagctaaataagtaacaaggagcgttcatgagcgagcaacgcgtggtggtcatggggctgggcaacctgctgtgggccgatgaaggcttcggcgtgcgggtggcggaacggctgtatgcccattaccactggcccgagtatgtggagattgtcgatggcggtactcagggactgaacttgctggggtatgtcgaaagcgccagccatctgttgattctcgatgccattgactacgggctggaacctggaacgctgcgaacctatgccggagaacgcattccggcttatctcagcgcgaagaaaatgagcctgcatcagaacagtttctccgaagtgttggcgctggcggatatccgcggacatctgccagcacatattgccctcgtcggtctgcaacccgcaatgctcgacgactacggcggtagcctgagcgaactggcacgggagcaactgcccgctgcggaacaggcggcgctggcgcagcttgctgcgtggggaattgtgccgcaaccggctaatgaaagccgctgtctcaattatgactgtctgagcatggaaaattacgaaggcgttcgcttgcgccagtaccggatgacacaggaggagcagggatgagcaacgacacgccatttgatgcgttgtggcaacgaatgctggcgcgcggctggacgccagtcagtgaatcccgtcttgacgactggcttacgcaagcgccagacggcgtggtgttattaagcagtgacccgaaacgcacgccagaggtcagcgataatccggtaatgattggcgaattactgcgcgagtttcccgactatacatggcaggtggcgattgctgaccttgagcagagcgaagccatcggcgatcgctttggcgtctttcgctttcctgccactttagtgtttaccggcggaaactatcgcggcgtgctgaatggtattcacccgtgggcggaactgataaacctgatgcgcgggcttgtcgaaccgcagcaggagcgtgccagttgatctaaccgcagcaggagcgtgcctcatgagcgaaacttttttccatctgctggggccaggaacgcaaccgaacgatgacagtttcagcatgaatccactgccgatcacctgtcaggtgaatgatgaaccgagtatggcggccctggagcaatgtgctcacagcccgcaggtgattgcgctgttaaacgagttacaacatcaactaagcgaacgccaaccgccgttgggcgaggtgctggcagtcgatctgttaaatctcaacgccgacgatcgtcactttatcaatacgcttctcggggaaggggaagtgagtgtgcgcattcagcaggctgacgacagtgaaagtgaaatacaggaggcgatcttctgcggattatggcgggtgcgcagacgtcgcggcgaaaagttgctggaggacaaactggaggctggctgcgcgccgctggcgttgtggcaggcggcaacgcaaaatctcttgccgacagatagcctgttaccgccgcccattgatggcctgatgaatggcctaccgttggcgcatgagttactggcacatgtacgtaaccccgacgcgcagccgcacagcattaatctgacgcaattacccatcagcgaggctgatcggctttttctcagtcgtctctgtgggccgggaaatattcagattcgtaccattggctatggcgagagctatatcaacgccacggggttacgccatgtctggcatttacgctgtacggacaccttaaaaggcccgttactggaaagttatgaaatctgcccaataccggaagtggtgctggcagcgccagaagatttggtcgactctgcgcagcggcttagcgaggtatgtcagtggctggcggaagctgcaccgacgtaaaaagacggtaagtatcgctttcagtcttatgaatatcgcaatcggcgaatacctctggtcgtagagtttcaggataaagagggagatctaccattatcgggttatttttctctcttcgcctacaggagtgcgcatgtgggatgtcattgatttaagccgctggcagtttgctctgaccgcgctgtatcactttttatttgtaccccttaccctggggctgatttttttgctggctattatggaaaccatttacgtggtcaccggcaaaacaatctaccgcgatatgacgcgcttctggggtaagctcttcggtatcaattttgctcttggcgtggctaccggcctgaccatggagtttcagtttggtactaactggagtttctattccaactatgtgggcgatatttttggcgcaccgctggcgatggaagcattaatggccttcttcctcgaatccacctttgtcgggctgttcttcttcggctggcaacggctgaataaataccagcacctgctggtgacgtggctggtggcgttcggtagtaatctctctgcgttgtggatattgaatgccaacggttggatgcaatacccgaccggtgcgcattttgatatcgacaccctgcgtatggagatgaccagcttcagcgagctggtctttaatccggtcagccaggtgaaatttgtgcacaccgtaatggcgggctacgtgaccggggccatgtttattatggcgatcagcgcctggtatttactgcgcggacgggagcgcaatgtcgcattacgcagctttgccatcggttccgtcttcggtactctggcgattatcggtaccctgcaactcggagacagttctgcgtatgaagtcgcgcaagtacaaccggtaaaactggcggcgatggaaggggagtggcaaacggaacctgcacctgcaccgttccatgtggttgcctggccggaacaggatcaagagcgtaacgcctttgccctcaaaattcccgcgctgctagggatcctcgccactcacagtttagataaacccgtgccgggtctgaagaatttgatggctgaaacctacccacgcttgcaacgcggacgtatggcctggctgttaatgcaggaaataagccaaggcaatcgtgagccgcatgtgttgcaggcattccggggactggaaggtgacctgggctacggcatgttgctctcccgctatgcgccggatatgaatcatgtcacagccgcacagtaccaggcggcgatgcgtggcgcgatacctcaggttgcgccggtattctggagtttccgcatcatggtgggctgtggttccctgctgctactggtgatgctgattgcgcttgtccagacgctgcgtggcaaaatcgaccagcatcgctgggtgctgaaaatggcgctctggagtttgccgttgccgtggattgcgattgaagccgggtggtttatgaccgagtttggtcgtcagccgtgggcgatacaggacatcttaccgacatactccgcgcactccgctttaaccacaggacaactggctttcagtctgatcatgatcgtagggctttacaccctgttcttaatcgccgaagtctacctgatgcagaaatatgcccgtctggggccgagcgcgatgcagagtgaacaaccgacgcagcaacaggggtaaaggagaaaatcatgtttgattatgaaacattgcgcttcatctggtggctgctgattggcgtgatcctggtggtctttatgatctccgacggatttgacatggggatcggctgtctgctgccgctggtggcgcgtaatgatgatgaacgccggatagtgataaacagcgttggtgcacactgggaaggcaaccaggtctggttgatcctcgctggtggggcattatttgccgcctggcccagagtgtatgcagcggcgttttccggcttttatgtggcgatgatcctggtgctgtgcagtctgttcttccgcccgctggcctttgattatcgcggaaaaatcgccgatgcacgctggcgtaaaatgtgggacgccggtctggtcatcggcagtctggtgccgccggtagtcttcggtatcgccttcggcaacttgttgctcggcgtgccgtttgccttcacaccgcaattacgcgtggagtatctcggcagcttctggcaactgctgacgccattccctttattgtgcggattgctcagccttgggatggtgattttgcaaggtggcgtctggttacaactgaaaactgttggtgtgattcatctgcgtagtcagctggcgaccaaacgcgctgcactgttggtgatgctgtgctttttgctggcgggttactggctgtgggtcggtattgatggctttgtactgctcgcccaggatgctaacggtccttccaatccgttaatgaaactggtggcagtgctacctggtgcctggatgaataattttgtcgagagccccgttttgtggatcttcccgctgctgggattcttctgcccattgctgacggtgatggcgatttatcgtggtcgcccgggttggggatttttgatggcaagtttgatgcaatttggcgtgattttcacggcaggcatcacgctgttcccctttgtcatgccgagtagcgtgagtccgatctccagcctgacgttgtgggacagtacttccagtcagctgacgctgagcattatgttggtaatcgtgctgatatttttgcccattgtgttgctctacactctctggagctactacaaaatgtgggggcgcatgacaacagaaactctccgccgtaacgaaaacgagttgtactaaggagcagaaacaatgtggtatttactttggttcgtcggcattttgttgatgtgttcgctctccacccttgtgttggtatggctggacccgcgtctgaaaagttaacgaacgtaggcctgatgcggcgcattagcatcgcatcaggcaatcaataatgtcagatatgaaaagcggaaacatatcgatgaaagcgatcttaatcccatttttatctcttctgattccgttaaccccgcaatctgcattcgctcagagtgagccggagctgaagctggaaagtgtggtgattgtcagtcgtcatggtgtgcgtgctccaaccaaggccacgcaactgatgcaggatgtcaccccagacgcatggccaacctggccggtaaaactgggttggctgacaccgcgcggtggtgagctaatcgcctatctcggacattaccaacgccagcgtctggtagccgacggattgctggcgaaaaagggctgcccgcagtctggtcaggtcgcgattattgctgatgtcgacgagcgtacccgtaaaacaggcgaagccttcgccgccgggctggcacctgactgtgcaataaccgtacatacccaggcagatacgtccagtcccgatccgttatttaatcctctaaaaactggcgtttgccaactggataacgcgaacgtgactgacgcgatcctcagcagggcaggagggagtattgctgactttaccgggcatcggcaaacggcgtttcgcgaactggaacgggtgcttaattttccgcaaagtaacttgtgccttaaacgtgagaaacaggacgaaagctgtagtttaacgcaggcattaccaagcgaactcaaggtgagcgccgacaatgtcagtttaaccggtgcggtaagcctcgcaagtatgctgacggagatatttctcctgcaacaagcacagggaatgccggagccggggtggggaaggatcaccgatagtcaccagtggaacaccttgctaagtttgcataacgcgcaattttatttgctacaacgcacgccagaggttgcccgcagccgcgccaccccgttattagatttgatcaagacagcgttgacgccccatccaccgcaaaaacaggcgtatggtgtgacattacccactagtgtgctgtttatcgccggacacgatactaatctggcaaatctcggcggcgcactggagctcaactggacgcttcccggtcagccggataacacgccgccaggtggtgaactggtgtttgaacgctggcgtcggctaagcgataacagccagtggattcaggttagcctggtcttccagactttacagcagatgcgtgataaaacgccgctgagtttaaatacgccgcccggagaggtgaaactgaccctggcaggatgtgaagagcgaaatgcgcagggcatgtgtagcttggcaggttttacgcaaatcgtgaatgaagcacgcataccggcgtgcagtttgtaatgcataaaaaagagcattcagttacctgaatgctctgaggctgatgacaaacgaagaactgtctaatgcgtagaccggaaaaggcgttcacgccgcatccggccactttcagtttgcaatacgtacgcttgagatcaggattgtctactttgagtataacatccttgtgaaatctccctttcctcataccgcttgcactatatactgcgggtaggaaaggcgcgcagagggaaatataagattgttaactatccccctctggaaatacgacttgtgagcataagataaatcttagcaaaatacaaattaaagataaggaaattgttacgaaagctattaattattgttggtaatatagtttcaagtggtactataactggctgttaaatggcatttataactattaggtgcagagatattcgcttaaatggattagtttctttgtggaaaagtaactgatgttataatgtatgatgttgactatttcactattccaataaaaccagtcagctttaaacaagcagcgtcatattaagagagataaacatttgccgctgttggtcctcgcaggccatttacgcggcaaaattccacacgtaatcctggtataagcacttctgcgtcgcggggagtgaatgcggaaatatggacctgaacttctttacgaccgtcggaggggataatgaatcctttgccgcttttgcgatcaaaggttttgacaattcctgtcattttacgggacaaacaaattccttactgaaaatactgcgctgcactatacggggttaataaaataaagccagcgatatttaagaccgccggacggctaaaataaaatttgcttaatctcaattatcatgcgttaatagctgcgtcggtttgaaagacagacagcatacaaagtagtttactaaagcagttctcattatcaggcattatccccttcttttgagtctctctcctgaacactaagtagtttctgtattaaagccctgtttgccgaaaggcccaaaatgaaggaagtaaaatatgtctaataaaatgactggtttagtaaaatggtttaacgcagataaaggttttggctttatcactcctgatgatggcagcaaagacgttttcgtccatttcaccgccatccagagcaatgaattccgcacgctgaacgaaaatcagaaagttgaattttctattgagcaggggcaacgtggccccgcggcagcgaacgttgttacgctctaaggttgccattattactcaacatctccatttccgctgtccatgttgtcatggttcacagtaccgcacatcggcattcgatgtgacggagcgaaaccctttgggcgctaagtgtattttttgtaaatcgacgatgatcacctttgataacgtcgcgctgcaaatacgcactgaccatgcgccgctggattagtcaaaataatatcaggctccctcgtggagccttttttatatctgccttatttttcttcaacgctgtatgtatagtaagcgataacctgttgattattgaatctttcggggagatggcttataacatttcttacctgaccagggtaccgggaaccaacaccttactggcgtgttgctgtcttttaagaccagaagaggttaacagtgaatattgaagagttaaaaaaacaagccgaaacggaaatcgccgactttatcgcgcaaaaaatcgccgagctgaacaagaatacagggaaagaagtctctgaaattcgcttcaccgcacgagaaaaaatgaccgggcttgaaagttatgatgtcaaaatcaaaataatgtgattttgtgaacatcaccccgtgcgaggtgatgttccgcttgttgctaatttagtgaccaatcattggcgcttgtggaattaagcgtcggtacaattcctccggcaccgggctttgccatactcccgcatacattgcgtaaccaatcaccgcaaacataatccccagaaccagtagcgtcattaaccagccagacaacgcaaaggcttttttatttgccgcaggtttttgcagactaaaggtcaatgtactggctaccggacaactctctacgcaagtcatacagccggtacattccactgttcgtacctgaattaatttatcgaccgggatccgacttgggcaattttttgcgcatttgccacagtcgatacaactttcggcattgcgacgaatcttaaacgggctcaataggctaaccacgcccatcagcgcgccatatgggcaaagataacgacaccaggcatggcgaataaacaggctggcaatcagcaaaacggtcacgctgattaatgtcgcggtccccatatgacgaaagaaatcgagcattttaacgtccatcaccacgctgtaggggctcaacataaaatagtgaatcgcctgagcgggcatcaataacgcgatatagataaaaaaactcaacagcaaatacttcacgccgcgcagaggaatatccagccagcggggaaggacacattgccgaccaaacagtttgttaccgagatcgccgattaattcagaaagcgtaccaaccgggcataaccaactgcaaaaggcctttttgagtaatagactgatgacgataaaagcgaccaataacagcatcgcggcggcgtggacggacggtaactgacctgttacaaggctatatttcagattcatcagcccggcaatcggtagccagccttcgatacctcccggtctggcgacaaatgtcgtgctacttgccgtttcgtaatagcgcacccaataccagaacgtgatggcaatataaatattcattgccaacagtaataattgcgtcgctttacgccaggtcgtggcattacgccagtcattccacggtaatttgccgcccgtcgtgcctggccgccgctgccagcgggttcttttattctctgccatgattttgccagtccgttaagttgtataccaaatgccactattctagttgttcttaactggctgatattgattcaaatcgcgttcaggtctttcttatgcaaccatgcttccagagcggcaacactgcgtgtaatttcttcgtgtggaaggggggcagataatggctgctgctccagttgtgcgcatagctggctggcgatatgcattcccagactgctgcaactgctttttagctgatgcgcggcacgctttattttctcgctatcctgactggcgcgggcaatgtcgatttcatcgagaagcggcagggcatgttgtgtaaataataccagccattcgtggatcttctccgtccccattaactgagcatcttcattgagttggcttacatccaggctttgatcattattgacttgcagttggagatagtgcgccagtaactgaccgagcacttcacgcggcaccggtttagggataatcccgcggaataaactactggtacgctggcgcagcgtttcgtcaatgacatgggcgctaaagccaatcaaaaccaggctcggatattgctgtgccagttgtcgggcaagcgtaatgccgtcgatatccggcagatcaaaatccaccagtgcggcagcaaacggttcgctattttgcagtgtctctaaagcctgcgcggcattgccaacagcaacaatctgcgcaccactggttttcagcatctcaatggtaattcgctgggttagcgggttatcttcaattaacagcaaacgtaaaccgtcaagacgcaccgcctgattgactgtttttggcacgggtgccgtggcaacacgtaacggcaagcgtaaacaaaaacagcttccaacctccggcgtgctggtggcgctcagttcgccgcccatcgcctgggccagacggctactgatagtcagtcccagcccggtgccgccgcgtttgccgcttacctgcacaaatggctggaagatttctgccagtttcgcgggatcaataccgcagccgctgtcttccacttcgaccagccattgctcgccatcagtgcgactacgcaggataatgtacccttcgtcagtaaaacgcagggcgttgctcaacaggttggttataacctgacgaatacgtcgtggatcgcccattaacgcgcacggcatatcatcggcaattgccgttgccaggcgaatcgggcgacctttcacccgtccgctcattaattgcagggtactttccagcagcgggcgcggttcaaagggctcatcgctgacgctaacattcttgccacctgcttcgatagcggaataatcgagaatatcgttgaggatggtcagcaagctttcaccagagtcagtaattgcccgcaaatcatcacgctgggcgttaagtgcggggttatctgccagcagttgagcagtgccgagaataccgtacagcggtgtgcggatctcatggctcatcgccgccagaaacgcgctttttgcctggctggctttttctgcttccgcccgtgcctgtcggtgttctatcaccagttcctgcaattcagctgtacgcgctttgacctgcgccgccagctgttcgcggtggcgattcagtgcatgaacattgctgcgaaacgcatccatcagccgcccgatggtatccagctcccgtacgccagcggtttccgggaaaggggagtcaatatcaccgtccagcagccgttgcagcgcctgcgtttgttcggcaagtggacgcgtgacactgcgataaaccacgcgccagaggatcagaatcagtgcgcaaagactaaccatccccagcaataacaggctgtattgcccgcgtgcactcgctttttccagatgcgccagtccgtgctgattacgcagctcaatggtgtcgaccagctgactgacttcgctactaaactgcgcgaactgggcgatgttattttgtgcgagagtttgtaggtgattgctgatttcactgtcctgctgatacagcgccagcaaatcgctatattggctaacggtagttaacgttgttgcgacctgcgcacgaacacccggatcttcaatgcgtatttgccgacgttgcagaattttcaccgcattattgagctgcttttccagcgttggtgcatttttctggatctgctccagccccagattcatcaccatttgctgcacccgcagagcgctaaggcgcagttcattcatctggttaacatactcaagatcgatatcaatcagccgatcgagtgcactttcagcagcctgacgctgatcttgttcgatcaaatcgtaaatcccggcctgggtcgctccagcggaagttgtcgcattattcgcctgaccttgcgccaggcgtgcgatctcatcggcggcagcgactatctgctgactgagttgctgttgttgctggcgcagttgcaaacgctgccccaccagttccccttgctgacgtaagctacgggagatctcctgctcctgttgttcaatagcggtggtatcaaaaccttgttcccgtaacgcttgcagcaacgcattaatcttcaggctttgtgcggtgagcattcgcccctgcgcctgccacatcttttcgttatcggcactggtcaggttctgcgcggcgaaaagttcccaggcgctggcttcgctcaactggcgcgccatattcatggtaggaatcaatgcctgagtgttgtctttttccacctggctgataaagcgcaggttgtaccatcccaccagggtactggtcagggttaacagcgccatcagggcaaagcccatccagagtcttcgggtcagggttaaattcacggtcggtgcactttaggtgaaaaaggttgagtcgcaaagcggaatgcatctagcataaagccttattattgatgaggctatcatgcgcgtactgctatttttacttctttcccttttcatgttgccggcatttagcgctgataacctgttgcgctggcatgatgcgcagcatttcacggtgcaagcctctacgccgcttaaagccaaacgcgcatggaaactgtgcgcgctttatcccagcctgaaagatagttattggttaagcttgaactatggtatgcaggaggctgctcgccgctacggtgtggatttaaaagtgctggaggcaggcggctacagccagttggctacccagcaagcacaaatcgaccagtgtaaacagtggggcgcagaggccattttgctcggtagtagcacgaccagttttcccgacctgcaaaagcaggtagcaagtctgccggtgatcgaactggtaaatgctattgatgctccccaggtgaaaagccgcgttggtgtgccctggtttcagatgggctatcaaccggggcgatatctggtgcaatgggcgcacggtaaaccactgaatgtgctgttgatgcccggacccgataacgccgggggcagtaaggagatggtcgagggttttcgcgcagccattgccggaagcccggtgcgtattgttgatattgcgcttggtgataacgatattgaaatccagcgtaacctgttgcaggagatgctggaacgccatccagaaatcgacgtcgttgccggaacggccattgcggcagaggcggcaatgggggaagggcgtaacctgaaaacgccgcttaccgtggtgagcttttatcttagtcatcaggtgtatcgcgggctgaagcggggaagagtgattatggctgccagcgatcaaatggtctggcagggggaactggcggttgagcaggccatcaggcaattacaggggcaaagcgtttctgataatgtcagcccaccgattttagttctgacgccgaaaaatgccgaccgtgaacatattcgccgcagcctgagtccagggggatttcgtccggtctatttttatcagcacacaagtgcggctaagaaataatcagcacacatcagcggctaagaaataaccttcaccatgttgcgtcaccagtaaatccgcgctgagtttatgacgtaaacgacgaattaacacatcgacggtgcgcaggtcagggttttccacccgacgcgcagaaagcatacgtagcagacgttcacggctgagaatttcgcccggattcgtcacaaatgccaccaacatttcatactctgcgcgggtcagtttaatcggctcgccatcccgctccagcgtatggcggctcacattcaggcaataaccggcaaagcgatagcagttgtcctgagtgtgcggttgagcttgtcgcgcgaggtcgattcgccagagcagatttttcacccgtactaccagttcgcgcagttccagcggtttggtgacgtaatcgtctgcgcccatttccagcccaacaatacggtcaatccgatcgctgcgtccggtaaccagaataatccccaccgtactgcgttctcgcagggcgcgggttaacatcaggccattttcatcgggtaagttgatatccagcagaattaaatctacgctctgattctgcataatttcccgtagcccagcaccgctcgccgtaacggaaacggtatacccctcctgagtgaagtaggattgtaatcgcgcctgggtaaccggctcatcttcaacaataacaatgtgatgtggcatcagagggttttactcattctgttcatatctgttcatattctgccgtaagccgttcatcctgaccagtgccgctgttcatatttgctcattaagatcgcttcactaaaccataattctacaggggttattatgcggaaactctggaacgcgctacgccgacccagtgctcgttggagcgtactggcgctggtcgcaattgggattgtgattggcattgcgctgattgtattgccacacgttgggatcaaagtcaccagcacaaccgaattttgtgtcagttgccacagtatgcaaccggtgtatgaagaatataaacagagcgtgcatttccagaacgcctccggcgtgcgagctgaatgccatgactgtcatatcccgccggatattccaggcatggtgaagcgcaaactggaagcgagcaatgatatctaccagacctttattgctcactccattgatacacctgaaaaattcgaagccaaacgcgcggaacttgccgagcgtgaatgggcgcgaatgaaagaaaacaacagcgcaacctgccgctcctgccataactacgatgcgatggatcatgcgaagcagcatcctgaagcagcacgtcagatgaaggtggcagcgaaagataatcaatcctgcatcgactgtcataaaggtattgcccaccagttaccggatatgagtagcggcttccgtaagcagttcgatgagctgcgcgccagtgctaatgacagtggtgacacgctgtactctattgatattaagccaatttatgcggcgaaaggcgataaagaagcctctggttctctgctgcctgctagcgaagtgaaagtccttaaacgtgacggcgactggctgcaaattgaaattaccggctggacggaaagcgccggacgtcagcgtgtactcacccaattcccaggtaaacgcatctttgttgccagcattcgtggtgatgtgcagcagcaggtaaaaacgctggagaaaaccaccgttgccgacaccaataccgagtggagcaagttgcaggccactgcgtggatgaagaaaggcgacatggtgaacgatatcaaaccgatctgggcttatgcggatagcttgtacaacggcacctgtaaccagtgccacggcgcaccggaaatcgcccactttgacgctaacggttggatcggcacgctcaacggcatgattggctttaccagtctcgataaacgtgaagaacgcaccttgttgaaatatctgcaaatgaatgcgtctgacaccgcaggtaaggctcacggcgataagaaggaagaaaaataatgaacaataacgatctctttcaggcaagtcgtcggcgttttctggcacaactcggcggcttaaccgtcgccgggatgctggggccgagtttgttaacgccgcgacgtgcgactgcggcgcaagcggcgactgacgctgtcatcagcaaagagggcattcttaccgggagccactggggggctatccgcgcgacggtgaaggatggtcgctttgtggcggcaaaaccgttcgaactggataaatatccgagcaaaatgattgccggattgccggatcacgtacacaacgcggcgcgtattcgttatccgatggtacgcgtggactggctgcgtaagcgccatctcagcgatacctcccagcgcggtgataaccgttttgtgcgcgtgagctgggatgaagccctcgacatgttctatgaagaactggaacgcgtgcagaaaactcacgggccgagtgccttgctgaccgccagtggttggcaaagcacggggatgttccataacgctagcgggatgctggcgaaagctattgccttgcatggtaatagcgttggtacgggcggagattactctaccggtgctgcgcaggtgatcctgccgcgcgtagtcggtagcatggaagtgtatgaacagcaaacctcctggccgctggtattgcagaacagcaaaaccattgtgctgtggggctccgatttgctgaaaaaccagcaagcgaactggtggtgcccggatcacgatgtttatgaatattacgcgcagctaaaagcgaaagtcgccgccggtgaaattgaggtcatcagcatcgatccggttgtcacatccacccatgagtatctggggcgcgagcatgtgaagcacattgcggttaacccgcaaactgacgtgccgctgcaactggcgctggcacatacgctgtacagtgaaaacctgtacgacaaaaacttccttgctaactactgtgtgggttttgagcagttcctgccgtatctgctgggtgagaaagacggtcagccgaaagatgccgcatgggctgaaaaactgaccggcattgatgccgaaaccattcgtgggctggcgcggcagatggcggcgaacagaacgcaaattattgctggctggtgcgtgcagcgtatgcagcacggtgaacagtgggcgtggatgattgtggttctggcggcgatgctggggcaaattggcctgccaggtggtggttttggttttggctggcactacaacggcgcaggcacgccggggcgtaaaggcgttattctgagtggtttctccggctctacgagcattccgcctgttcacgacaacagtgactacaaaggctacagcagcactattccgattgcccgttttatcgatgcgatcctcgaaccggggaaagtgatcaactggaacggtaaaagcgtaaaactgccgccgctgaaaatgtgtatttttgccggaactaacccattccatcgccatcagcagatcaaccgcattattgaaggcttgcgcaagctggaaacggttatcgccatagataaccagtggaccagtacctgccgctttgccgatatcgtactgcctgcgaccacgcagtttgagcgtaacgatctcgaccagtacggcaatcactccaaccgtggcattatcgccatgaaacaggtggtgccgccgcagttcgaggcgcgcaacgacttcgatattttccgcgagctgtgccgtcgctttaatcgcgaagaagcctttaccgaagggctggacgaaatgggctggctgaaacgcatctggcaggaaggtgtacagcaaggcaaaggacgcggcgttcatctgccagcgtttgatgacttctggaataacaaagagtacgtcgagtttgaccatccgcagatgtttgttcgccaccaggcattccgcgaagatccggatctcgaaccgctgggcacgccgagtggcctgattgagatctacagcaaaactatcgccgatatgaactacgacgattgtcaggggcatccgatgtggtttgagaaaatcgaacgctcccacggtgggcctggcagccaaaagtatccgttgcatctgcaatctgtgcatccggatttccgacttcacagccagttatgtgagagcgaaacgctgcgtcagcaatatacggtagcgggtaaagagccagtattcattaacccgcaggatgccagcgcgcgcggtattcgtaacggtgatgtggtacgcgtctttaacgctcgcggtcaggtgttggcaggggcagtggtttctgaccgctatgcacccggcgtggcacgaattcacgaaggggcatggtacgatccagataaaggcggcgagcctggtgcgctgtgcaaatacggtaaccccaacgtgttgaccatcgacatcggtacaagccagctggcgcaggcgaccagtgcgcacactacgctggtggaaattgagaagtacaacggaacagtggagcaggtgacggcgtttaacggccccgtggagatggtggcgcagtgcgaatatgttcccgcgagccaggtgaaaagttgaattaacccgcgtcgcaggtgaaatcatgaccacgctgacagcacaacagattgcctgtgtttacgcctggctagcgcagttgttctcccgtgagctggacgatgaacaactgacgcaaatcgccagtgcgcagatggctgaatggtttagcttgctgaaaagcgaaccgccgctcactgcggcggtgaacgagctggaaaaccgtattgccacgctgacagtacgtgacgatgcccgtctggaactggccgcggacttttgcggcctgtttctgatgaccgacaaacaagcggcgctgccgtatgcaagcgcctacaaacaggacgagcaagagattaaacgcttgttagttgaggcagggatggaaaccagcggcaatttcaacgaaccggcagatcatctggcgatctatctcgaattgctcagccatctgcattttagcctgggagaggggaccgttcctgcgcgaagaatcgacagtttgcggcaaaaaacactgacggcgctgtggcaatggttaccagagtttgttgcgcgttgtcgtcagtatgacagctttggtttttacgcggcactaagccagttattgctggtgttagtggagtgcgaccaccaaaacagataacgtcgtttgtgcgcctgaaaagacgcgtttagcgtcgcatcaggcattatggcgcagttgccggatgcggcgtgaacgtcttatccggcccacaggaactgtaatctttgtagaccggttaagatgcgtcatcgcatccggcaaacacacatcacggatgagctacaaaccgggaaagccgctggcgcagcaggcggttttcctgcttcaggtgcgcaatatcatccattaacgtcagcgccaccgcgatccccggccagtccagagccagttcatgacgcaggcgtaccgcgcgttgcaccacaatggcggcatggtcgtcaaatacccaggttgtttcctggatctcacgcggttcaaccacccccaaaccgacaatttcattcaactcctcttcagagatgccggtatgcaggcaaaattcggtaatagtaaaagtcaccgtaacattagccattatgctttcccccaatctttacgtggatcaaaagagctctgggcgtctgccagttgctgccacagcgcggcagtgttttcatccggtttcggcggcatcacgattttcagtaccgcatacagatcgccggtctgttttttgctcaccagacctttgcctttaacgcgcaatcgttgcccggcctggctgcctggcgggatagtcagcaaaatgctttctttcagtgttggaacggtgactttagcacccagcgccgcttcccacgggctaaccggcaccacaatttccagatcctggccgacaatatcaaacagcggatgtggcgcaatatgaatcaccagccacaaatcgccatttggaccgccgttttcgcccggcgtcccctggcctttcagacggatgcgttgaccattgccgacgcccgccgggatcttcacattcagcgttttcggaatttcctgttcgatcatgccaaaggcgttataaaccggcaggttatagctgatggtacgcttatgctcagtaagcgtttcttcgaggaataccgccacttcgatttcaatatcgtggccgcgtgtggcggggcgttgacggctctggcgggcatgctgaccgaaaatactgctgaagatatcgtcaaaatcttcggcgttaaaactctgaccgtcgccatggtggaactgacggttaaattgcggatcgttgcgatgttgccacatctgatcatactcagcgcgacgttgttcatcacttaacacttcccaggcttcagcgacctctttgaagcgggcttcggcatccggttctttgctgacatcaggatggtatttgcgggcaagtcgacgataggcggtcttgattgtcttgagatcgtccgtcggtttcacgcccatgatggcgtaataatcctttaattccatagcgttatctcgcgtaaatcaacacaaattgaaggaacccctgtaaggtaactcctataagtgtagggtaatcctcaaaatttcatatgccaacacagaatatgttattgaaatcatcgcggagaggaggtcgccatcaagatgggttgctgaacatattttaaacaggtgaaaaagggtgagcgatttttgatagttgaaccaggcactttaagtttaactagggcgtcattatttattaaattttatagacgctatatatgggtagtaatatacatggaattagttgcactgcaaataattatttgaaacaggcctggaacgatataaaaaatgagtacgaaaaaaatcaaacatatagtatcacgctttttgaaaacacactggtgtgttttatgcggttatacaatgaactcagacgtaaagtaaatgaagaggatactccatgtctggaatgtgaaagtctagaaaaagaatttgaggaaatgcagaatgataatgatctaagtttatttatgagaatattgcgtactaatgatacacaaatttatagtggggttagtggaggtattacatatactatacaatatgttcgagatattgatattgttagagtgtccttgccgggcagagctagtgagtctatcacagattttaaaggttattattggtataactttatggagtatattgaaaacattaatgcgtgtgatgatgttttttctgagtattgttttgatgatgaaaatataagtgtccagccagagcggataaatacgccgggaatatctgatttggattctgacattgatttgtctggtatatcttttattcagcgtgaaactaaccaggcattaggattaaaatatgctcctgtagatggcgatggatattgtctgttaagagctatactggttttaaaacaacatgattatagttgggcgctggtcagttataagatgcaaaaggaagtttacaacgaattcattaaaatggttgataaaaaaacgatcgaggctcttgttgatacggcattctataatctcagggaagatgtaaagacgttatttggcgttgatctacaatctgacaaccaaattcaggggcagagtagtcttatgagttggagctttctgttttttaaaaaacaattcattgatagttgcttgaataacgaaaaatgtatcctgcatttacccgagtttatatttaatgataacaagaacttgcttgctttagataccgacacgagcgataggattaaagcggtgaagaattttcttgttgttcttagtgatagcatttgcagtttatttattgttaatagtaatgtggcaagtatctccttggggaatgaatcctttagtacagatgaagatcttgagtatggttatttaatgaacactggcaatcattatgacgtttacctccctcctgaactttttgctcaggcttacaagttaaacaataaggaaatgaatgcgcaactcgactatttaaatcgttatgcaatttaatggcaaaggcatatgctaaaaaccattgttattagtctcacacttttttattggtaaatattgtctctgtattggtaacgccgcagatattctgtttagccacaggtgcaattatcagcggcgtacgcgaggcaggggctaatcaggcatagtttgcgtcaaaccttgcctgtttttgaagatgtatatagaaaaacaggcgttcaacaagccattttgcgaacctgttcccggaaaaaagtcatatttctgtcacactctttagtgattgataacaaaagaggtgccaggaatgaacaaaacgctaatcgccgcagctgtggcagggatagttttactcgctagtaacgctcaggcacaaaccgtaccggaaggctatcagctacagcaagtgctcatgatgagccgccataacttacgtgcgccgctggcgaacaatggcagtgtgctggagcagagcacgccgaataaatggccagaatgggacgtccccggtgggcaactcaccaccaaaggtggcgtgctcgaagtgtatatgggccattacatgcgtgaatggctggcagagcaggggatggtgaaaagcggggaatgcccgccgccgtacaccgtttatgcctatgccaatagtctgcaacgtaccgttgcgaccgcacagttctttattaccggcgcattcccggggtgtgatattcctgtgcatcaccaggaaaaaatgggcactatggacccaacctttaacccggtgatcaccgatgattccgccgcattcagtgaacaggcggtggcggcaatggagaaagagctcagcaaactccagcttaccgacagctaccagctactggaaaaaatcgttaactataaagattcccctgcctgtaaagagaaacaacagtgtagcctggtggatggcaaaaatacctttagcgccaagtatcaacaagaaccaggtgtttccgggccgctgaaagtcggcaacagcctggtagatgcgtttactttgcaatattacgaaggttttccgatggatcaggtggcctggggagaaatcaaatctgaccagcagtggaaggtgttgagcaagcttaaaaacggctaccaggacagcctgtttaccagtccggaagtggcgcgcaatgttgcgaaaccgctggtcagttatatcgacaaagctctggtcaccgatcgcaccagcgcaccgaaaattacagtgttggttgggcacgactccaacattgcctctctgttaacggcgctggatttcaaaccgtatcagttgcatgaccagaacgaacgcacgccgattggcggcaaaatcgttttccagcgttggcatgacagcaaagccaatcgcgatttgatgaaaattgaatatgtgtatcagagtgcggaacagttacgtaatgccgatgcgttaaccctgcaggcacctgcgcagcgtgtgacgctggaattaagcggttgcccgatagacgctgatggtttctgcccgatggataagtttgatagcgtgttgaatgaagcggtgaaataacagaaaactcccccgcgagaagcgggggagtcgctggttaaacgtttttacgttcgatggtctgttcgccccaaaaaaggctatctttatcggtcttagcaaaggctttgactaacacttcatcactaccttcttcccaaatcttttccgccattttttcgtcgtacccggcgacttcgaaaatggcctcggctatttccgggctcgtattgcgcagagatgcccattcaccgacgtgatgagctttcgcttcttgagttggcatgcgtatcctcctgttgaagattagccgttaagtttaactgccagacctgcgacatattccccttgataacgagcaatagacagttcttcctggctgggctggcgactaccgtcaccgcctgcgatggtggttgcgccgtacggcgtaccgccgcgaacctgactaacgtcaaataattcctgcgctgcgtagccaatagggacaattaccatgccgtgatgcgcaagggtcgtccaggtggatgtgatggtttgttcctgaccgccgccagtaccggtggaactaaagacgctcgccagttttccgtatagtgcgccggaagcccacaggccgcccgtctggtcgaggaaggtacgcatttgaccggacatgttgccaaagcgggtaggtgtaccaaaaataatggcgtcgtaatcggccagttcttgcggggttgcaaccggtgcagtttgcgttttaccgcctgctttttcaaataattgcggcggcatggtttccggtacacgcttaacgacaacttcagcgccatccactttgcttgcaccctcagcgactgcgcgtgccatcgtttcaatatgtccgtacatggaataataaagcaccagaactttagccatttctaaccactcctcgtgttatctctattccgtagcgattcgctaccacttatttaaagataagacgtccttttcagagtgcaaatttcacaaccacttatttgatttataacaactttcacaagcacgtaattttgtcgcaaaatgacacatttttatctcatcgcgtttttttaatcataagagcggcttatggataattattggagatgatatctattctcgctaagaagctgttgcaggatattaccaaacgcgggtctgcccgcgtcagttcactaagcttagtcccacgtagcgaaaatatggcagccgccatacgccgcgttaattctatgcaatatgatgtctatacccagacggaggtcagtaatggcaaaccatcgaggcggttccggcaattttgcagaagaccgcgaaagagcaagtgaagcaggtaaaaaaggtggacagcacagcgggggtaatttcaagaatgacccgcagcgcgcatctgaagcaggtaaaaaaggtggtaagagcagtcacggcaaaagcgacaactaaccgggctaatcaatgacgaatgcatttttgtctgtagctcgtcaaaaagccatcaccgccggttacccggtggttgatactgatgacaaatgtaagcttgcctgatgcgcgatgcttatcaggcctaccagaagattgcaatatattgaatttgcactgttttgtaggccggataaggcgtttacgccgcatccggcatgaacaatgcgtacgttgtcaacaatctgcaccgccggtaaccccggcggttttctgtttatggctcctgatgaacaacttctggcggtggaacgtcaaccaactttctgcttaacaacgcattgagtaaaatcgcgccaaaggttgctgtaccaatccctcccaacgtaaaaccgcccagcgtgagagcaaaatcacccgcgcccagcactaaggttactgcgaccataatcaaattaccgttctggcttaaatcgacacggttttgtacccatatccttgcgcctgcgacggcaatcagcccgaacacaacaatacttgcaccaccaataaccgcggccggaatggtatgaatcagcgcaccaaatttcggactaaagcccaacagcatggcgatgacggcagcagcaacaaacaccagcgtgctgtagactttggtcacggccatcacaccgatattttcagcataggtggtcacgccgctaccgccgacagagccggaaagcatcgttgccagaccatcgcctacgaatgcccgccccatatacgggtccatattgcgtccggtcatcccggcgactgccttgagatgacctaagttttccgccaccagaatcaccgccacgggcgcaatcagcatcattgcctgaccattaaaagcaggagtggaaaaatgtggcagaccgaaccaggcagcatggctgacgagagtaaaatcgacggcttttcccagccctaaaacgttggtcatcacgccatacagcagacaggcgacaattaatcctacgagaatcaataaccgctggatcatgccacgggtaaacaccgccaccagcccaatacacagcaccgtcattaccgccatccagctatcaaaggcgctagcgcttacacttttcactgcgataggcgctaagttcaggccaatcgccatcaccaccgcacccgtcaccaccggcggcatcagtcgttcaatccagcgcgtaccgattttcatcaccaccaggccaatgacggtataaaccagcccacaggcgataatcccgcccagcgcaatgctgatattcgggttaatgccctgaccgttaaagcccgtcgcggcgatcaccacgccgacaaaagccgcgctggagccgagataactggggacgcgcccgccggtaataaagaaaaacagtaacgtgccgatcccgctcattaaaatggaaagattgggatccagccccatcagaatcggcattaacaccgtcgcgccaaacatcgccaccgcgtgttgaacgcccattactgccgtctgagcaaacggcaatcgttcatccggcgcgaccacgccgctctctgtagaggtgctttttaactgccagtgaggaaaaccgaacattgccatcagctgtctccttaaggaggttaacaagcagggcgcatcagcgcgtgataactgcgatcgaaccacaccagcccgtagggtgtggtgtgacgatgaatcgcttcgatggcgcaaaacagaatgtcgtgggtgccgacgctcaccacctggctgatacggcagtcaaagctaaccagagcctcttccagttgcgggcatccggtcacccccgtctgccagcgggcggcggcaaagcggtgttccatgggcgttttgccgccaaaaaggttactaagcggctcctgcccggcgctaagtgtatttacacacagcgttcgattttcattgaatgccggccagacggacgccccacgattcaggcacaccagtaatgtgggcggcgtatcggtcacactgcagacggcgctggcggtgaacccggcgcgcccggctggaccgtccgtggtgataatattgaccgccgcgcccatgcaggacatcgcatcgcgaaaagtttgttgatcgacaatgttcatagtttgctccttacaacagcccgcaggcttcttcaaaggacagacgtggcaggcgcgcataaagcttgctgctatcgccatagccgatattaatcagcagattgctcttcagcgtgctgcccgtaaaaaaggcgtcgtccacgtgttgacggtcaaagccgctcatcgggccggtatccagtcccagcgcccggcaggcgacgatcagataggccgcctgcatggaactgttgcgaaacgctgtttcttcggcaagttgtgggctggaggtaaaccaactgcgggcatcaccgtggggaaacagtagtggtaaccgttcataaaattcactgtcccaggcgacgatagcggtgacgggcgcggtcagggttttttgcagattgccgctggaaagtgccgggcgcagacgttcttttccttctgccgtgcgggtaaacacgatccgtgccggagaacagttagcacttgtcggcccccatttcatcagggcataaatctcccgtaacgtctcatcgctgacgggtgtctcccgccagccgttgtgagtgcgggcatcggtgaacagggtgctaagcgcacctgggctaacggcttcgttcatagcaattccttacagggcggcttcacggtgatgtaacaggctggcaagcccgttgagtaacagagcattaaacgtttcgggatcggtcacgttgcaggcgtgtccgccatagggcatcaccattttctggctatcgggcagggcggcatgaagttcactggaacatgctgttggcaccagcagatcatcactggcgcagatgatttgcaccgggcagcggatgcgatccgcatggtgactaaagtcagcgcgtttgagggcgttaagtcgacgcagtaaattatttttgccctgaaaatgcgccagtgccagcgcgtcttctgcctccaggcgaggtgcgcgggccgccatccagtcggcgggatagaggaacaacggctgcgcttccacccatgcctgcgcgccgccgctatacagtaatcgttcgcgaacctgaaaacagcggcgcgtatgggcgtttattcgtagccagccgttaacgctgatcagcacagttacgctcgcgggataatccagcgccagctgcattcccaccagcgcaccgagcgcatggccgaccactgcgtaatgctcaatccctgcggctaccagcgcctgatgcagttccgctgccatctgggcgatactgtaatcttctgccagcgtgtcgggattattgccggtgccgcgctggtcgtaacagactacctgatactcctgctccagcaccgccagttgcggtaaccagtaactgccgctacccccaagaccgctaatcaacaccactacgggcgcatcagcataagggggaggactgagactaagtttcatcgcggcctcacttggcgatatgcgcaattgtggcgatttccaccagcgcgtcaggttttaccagtccgcactgaatgcagaatcgcgccggtttatcacccggaaaaaactcggcgtagatttcgttaatcgcggcgtaatttttccagtcggtaataaagatgctgttgaaggtcacatccgccatcgtgccacccgccgtctcgatcaccttgcggatagtttccagaacgtggcgggtttgcgcctttgggtcatcggcaaacagcacgttattatgttgatcaaaagccagcgtaccggagacatacaccacgccatcagccagcgtgccgggaacgaagggggccagcggtgcgctgctgccagcgggaataattacggattttggcatcgttaaactccttaagcgatatgagcaaaggacgtgggagaaagcgcgtcgcagaatgtttcgacgtcgctgacccagccaaaaaaggtttcgatattgaacaacgcggctttctgcgcaaatttcggccccgcctggtgagttgcgtcttcaagcaccacgccgaaatactccagaaaaaagccgtcgcgtagcgtgctttcgacgcagacgttggtagcgatgccggtgaaaaccagatggcgtattccgcggctgcgcaaaatgctgtccagcggcgtattgaagaaaccgctgtagcgcggcttcggcagcacaatatcgccaggctgcggcaccagttcatccaccagttgataatcccaggagcctttcgccagcaatttcccctgcagctgcggctgcttacgcatggttttcagggcgttgcttttatgaaaattcggactgccgggtccgccagcctcgacatactgttcatcccagccattttgaaaccagatgatcagcatccctgccgctcgcgctgcggtcacggcggtttgaatgttggcaatgaccgggcgagtggtactgacatcaaacccggcgagatctaagtagccgcctggcgtggcataagcgttttgcatatccaccacgatcagcgcactttgctgcggatcgaaggtaatggcttccggtcgagcggttaaggtcgtcatcatgccacctcctgagtcagcgcaggtagatgggcgcggcattgcatcagtggttgaatgcgctcgccgaaggtttcgattccgctcagaaaatcgtcgaaggttaacagcacgccttcggcaccaggcacgcttgcgacttcatctaacatgcgcgcgacactggcgtaagaaccgactaacgtccccatattgatgtttaccgcgctagtgggatcggccatctgacgaacgttggtgtcagtaccggagcgggtatctttctgactttgttcggttagccagcttaacgcctcttcatccgcgcccgctttgtagtgttcccatttggcgcgagcggcatcgtcggtttcatcggcaatcaccataaacaacacataagagccaacgtcgcgtccggtttgctctgcggcctgtttcatccgcgcagcggtcggggcgaaagccgtgggtgtatttacgcctttgccgaaacagaagttgaaatcggcataccgggcggagaacgccatgccagcgtcgctttgcccggcgcagatcactttcatggggacactcggttgcggactcacgcgacaatcattcatggtgaaaaaatcgcctttaaaatcgcttttccccgtgccccacaggtcgcgcagcacctgaacatattcggtgagatagtcgtaacgacgggagaaatagtcatcgccaggccagatacccatctgctcatactcgggcttttgccagccagtcacgaggttgacgccaaaacgcccgccagagatggagtcgatggttgcggccatacgggcgacgattgccggaggtaacgttaaggtggcagcagtggcgtaaatctgaatgcggctggtcacggccgccagccccgccatcaaggtgaagctctcaaggttgtgatcccagaactcagttttgccgccaaagccacgcagtttgatcatgctcagggcgaaatcgaaatggtagtgctccgctttttgcacaatggctttattcagttcaaaggtcggcatgtactgcggcgcgtgggtgctaatgagccagccgttgttgccaataggtacgaatacgccaattttcatcatcaacctctcttcgtctcgtaaagtgaaagtcagacggggcgctgcatcctgcatatccttttcagccgcgtattggcttgtttgcaaagcggatgccagtttttaaaaagttaatgttattaatctgttaacattacgttatctaaaatatctggtaaaaagtggactaaacggtcaaaacagttgcacataaaacatgcatctgtgcgcgatgagagtgcagaaggtcgaggccgggcgggggttttgctatcctgttgccaatctacaagaggggagagcgcatgacgcaaggcgcagtgaaaacaacgggtaaacgtagccgcgcagtaagcgcgaagaaaaaagcgattcttagcgcagcactggacacttttagtcaattcggttttcacggcacaaggctggagcagatcgcagagttggcgggtgttagtaaaaccaatctgctgtattactttccgagtaaagaggcgctgtatattgccgtgctgcggcagattctcgatatctggctggcaccgttaaaagcgtttcgtgaagatttcgccccgctggcggcgatcaaagagtacatccgtctgaagctggaagtcagtcgcgattatccgcaggctagccgcctgttctgtatggagatgctggcaggcgcgccgctgttaatggatgaactgacgggcgatttgaaggcattaattgatgagaaaagcgcgctgattgccggttgggtcaaaagcggcaaactcgcgccgattgatccgcagcatttgatttttatgatttgggcttccactcaacattacgccgatttcgcccctcaggtggaggcggtgacaggcgcgacgttgcgcgatgaggtatttttcaatcaaacggttgaaaacgtgcagcggattattattgaggggattcgaccacgttaaagatgccggaggaggttgtaacatcctccggctacctgtttaacctatagtcattaagctggcgttaccgccagcggcagcggtattcacactcaggctacgctcgatatacagccgttccagaaggatattgctttcgccacgggcaaaaccctgcacgctaacaattgtgccatcccgcgcggcaactgcttcacacaatgcgcgaagctgatcgctatcaccgtggaagatcaccgcatcaaacggttgagcggttatattttccgctttcgccagttgaatacgttcgctgactgcgcttggcaatgccttcactaactgacgatgcagcgcgtcatccggccacagtacctggctgcccaccgccagcacggcggcgagctgagtcagcgcatcctgctcatcatcggcaatacacaacacgcgctcacgcggcagcagcgtccaggtgttgcgttcacccgtcggccccggcagcaatcgttgtgttcctgcctgcgccagctcgccatattgcgtacataacgcctgcaattctggacgatttgctgcccattcccgcagtgcatttagcggctgagtcaatgcggctttcaactgcgcatcgaccggatactttgcatcctgacgcgcgagcgtcactgccagcgcactttccgggcgattcgccagcagacggtagagatagagcggaccgcctgctttcggcccggtaccggacaacccttcgccgccgaacggctgcacaccaaccactgcgcccaccatattacggttaacatacaggttaccaacatgggcgctgccagtgacctgggcgatggtttcatcaatgcgcgtatggacgccaagcgtcagaccataaccggaagcgttaatctgctcgatcagctctggtagctggttacggttgtaacgcaccacatgcagcaccggaccaaagacctctttttgcaattcggcaaagtcatccagttcgatcagcgtcggggcgacaaaggtgccgctttgccattcacgggcatcttcgctgttttcccgcaccgcctggaacaccggacggcctttgctacgcatggtctgaatatggcgctcaatattggctttcgcttcgctatcaatcactggaccgatatcggtggtcaggcgacccggattacccatccggcattcggccattgcgccgcgcagcattttcaacgtgtggtcggcaatctcatcttgcaggcacagcacgcgcagcgcgctacaacgctgacccgcactgtcgaacgcgctggccagtacatccacgacgacctgttcggtcagtgcactagaatcgacaatcatcgcgttcatgccgccggtttcagcgatgagcggaatagggcgaccctgagcgtccaggcggctggcgatattgcgctgcagtaacgtagcgacttcggtactaccggtaaacatcaccccgcgcacgcgatcatcacccgtcagttgcgcgcccacggtttcaccccgacctggcagcaattgcaccacgcctggcggtacacccgcttccagcaaaatggcgatcccttgcgcggcaatcagcggcgtttgttctgccggttttgccagcacgctgttacctgccgccagtgcggcggcgatctgcccggtgaaaatagccagcgggaagttccacggactgatacacaccacaggccctaatggacggtgggtttcgttagcgaaatcatcccgcacctgtccggcgtagtagtggagaaaatcgaccgcttcgcgcacttcggcaatggcgttactgaaggtttttccggcctcacgcaccagaataccaatcagttgctgcatctggctttccatcagcacggcagcgcggtgcaaaatcgctgcgcgttcagccggaggcgtggcaaaccagattggcgcgttattaaccgcactttccagcgcctgttctacttcacgcggcgtggcttcacgcacatagcccacaatatctttcggttccgcagggttaataacggggctcatctcacctgccgctaccggttgttccagcattggcaaggcctgccatttttgcagtgcactattgagcagggcagaggagaggctggccaggcggtgttcgttagcgagatccagccctgcgctgttgtcgcgcccgtgaccgtaaagatcgcgcggcaggggaattttcggatgcggtaatccagtttgcccttcctgttgcgccagtttttctacagcagtgaccggatcggcgaccagttcatccagtggcaaagaggtgtcggcaatacggttaacaaagctggtgttagcaccgttttccagcaggcgacgcaccagatacgccaacagcgtttcatgtgtgccaaccggagcataaatacgacacggacggttaagtttgccgtcggcaactttcccggtgacctgctcatacagtggctcgcccataccatgcaggcactggaactcgtactgacccgggtagtagttctgccccgccagttgataaatcgccgccagcgtatgggcgttgtgcgtcgcgaactgcgggtagattagattcggcaccgccagcagctttttcgcacaggcgagataagaaacgtcggtatacaccttgcgggtataaaccggataaccttcaaggccgtccatctgcgcacgcttaatttcactatcccagtacgcgcctttcaccaggcgaatcatcagacggcgacggctgcgggtggcgagatcaatcaggtaatcgatcaccaacgggcagcgtttttgataagcctgaataacaaaaccgatgccgttccagcctgccagttccggctcgaaacagagtttttccagcagatcgagggagatctccaggcgatcggactcttcggcgtcaatgttgataccaatatcgtactgacgcgccagcagggtgagacttttcagacgcgggtaaagctcttccattacccggtcatactgggcgcggctataacgcggatgcagcgcgctcagtttgatactaatgcccggcccttcatagatgccacgaccgttagacgctttaccgatggcgtgaatcgcctgctgataggaaaccatatacgcctgtgcatctgcggcggtcagcgcggcttcgcccagcatatcgtaagagtaacggaaacctttctcttccagcttgcgggcattggctaacgcttccgcgatggtttcgccagtgacgaactgctcacccatcaggcgcatcgccatatccacacctttgcggatcagcggttcaccgcttttaccgataatgcggttcaggctgcgggagaggctggcttcgttatgggtggaaaccagtttgccagtaaacagcagcccccaggtggcggcattaacaaacagactcgggctacgaccaatgtgactctgccagttaccgttgctgattttgtcgcgaattaacgcgtcgcgggtggctttgtcgggaatacgcaacaacgcttccgccagacacatcagcgccacgccttcctggctactcaggctaaactcctgcaataacccctggaccatacctgcgcgaccactggcatttttttgattacgcagtttatcggccagctgatacgccagtttgtgcgcctgttcagcaactggctgcggcaggcgggcttgttccagcagcatagaaaccgcttcggtttccgggcggcgataggccgcggtgatcgcggcgcgggaaacgctctggggcaatatttgctcggcaaagtcgaggaatggctggtgtggttcctctgccggagtcggtgcttcatcgctctcattggccgcgccagaaagcagcgcaggtagctccggcagagtatcgctgttttccagttgttcgagataagaaaaaatcgcctgcttaattaaccagtgtggtgtgcgatcgatacgtgtcgcggcagacttaatacgctcacgcgtcgcgtcgtccagcttaacccccatggtggtggttcccatgccattactcctgttgttcagaaaggtgcaacttaacgttatcgtgaaatatccatgatgttgcaactttgtgcaaccatgttaaatgtgacatgcgtagcaagcttaaaaatgaatgaaatgttaataaaagaaatcgatatgacagggattaaaaaaataactcagactttttctctgcggcagttaacatttttgaaaggtgcaaccgcaaaaaatgtgagagagtgcaacctgatgaaaaatagtgtcgctgagcactaaaatttaatgtaaatggtgtgttaaatcgattgtgaataaccagcgcttccggcaggatacggtcgccctggtaaaacataaactctgttaccccgttccggtggcagatataacggcaagtttcgacattgccgataataattttttggagactttagatggctattagcacaccgatgttggtgacattttgtgtctatatctttggcatgatattgattgggtttatcgcctggcgaagtacgaaaaactttgacgactatattctgggcggtcgtagtcttgggccattcgtgacggcattaagcgcgggtgcgagcgatatgagcggctggctgttaatggggttgccgggcgctgtttttctttccgggatttccgaaagctggatcgccattggcctgacattaggcgcgtggattaactggaagctggtggccgggcggttgcgtgtgcataccgaatacaacaataacgccttaacactgccggattatttcaccgggcgctttgaagataaaagccgcattttgcgcattatctctgcgctggttattttgctgttcttcaccatttattgcgctagcggcattgtggcaggcgcgcgtctgtttgaaagtacctttggcatgagctacgaaacggctctgtgggcgggcgctgcggcgacgatcctttacacctttattggcggtttcctcgcggtgagctggactgacactgtacaggccagcctgatgatttttgccctgatcctgacgccggttatcgtcattatcagtgtcggtggctttggtgacagcctggaagtgatcaaacaaaagagcatcgaaaacgttgatatgctcaaaggtctgaactttgttgccattatcagtctgatgggttgggggctgggttacttcgggcagccgcacattctggcgcgttttatggcggcggattctcaccacagcattgtccatgcgcgtcgtattagtatgacctggatgatcctctgcctggcaggggcggtggctgtcggcttctttgggattgcttactttaacgatcatccggcgttggctggtgcggtaaatcagaacgccgagcgtgtgtttatcgaactggcgcaaattctgtttaacccgtggattgccgggattctgctgagcgcaattctggcggcggtaatgagtaccttaagttgccagctgctggtgtgctccagtgcgattaccgaagatttgtacaaagcgtttctgcgtaaacatgccagccagaaagagctggtgtgggtagggcgtgtgatggtgctggtggtggcgctggtggcgattgcgctggcggcaaacccggaaaaccgcgtgctgggcttagtgagctacgcgtgggcaggctttggcgcggcgtttggtccagtggtgctgttcagcgtgatgtggagtcgcatgacgcgtaacggtgcgctggcggggatgatcatcggtgcgctgacggttatcgtctggaaacagttcggctggctgggactgtacgaaattattccgggctttatcttcggcagtattgggattgtagtgtttagtttgctgggtaaagcgccgagtgcggcgatgcaaaaacgctttgccgaggccgatgcgcactatcatagcgctccgccgagtcggttgcaggaaagctaagggacttagcctgcggcggttttgtttggcttcagcagcgggttgcgctcccttaatgtgcctcgccatataaattgaatggtgcagggagcgcgcagggggcggccaatcgccgccgccccctgctgtcccggccttcggggaacgcttcagcgattttgacgccaccaacacccgagctgttattatgttccgggcaaaaagttagatttgataatcgcggatggacgaaattgcttgatacacccgcttatcagttttacatggaagctctgatgcattgagtctggacagttttgtcggctggatacggcgtttacgcggcatccggcaagaacacatggttctttgcaaacaatcccatctttctaccctggaataatcgtttatatcccttggcattacctctctttgtttacattccaacatcattttataaacattccgcttgtgtttttctttgccgtaatgataatcgctatcactgcgatttacttttctttgcatagattgactcagaaaaacgtttaagggtgggtggcatgtttgttccgtttctcattatgttgcgcgaaggacttgaagccgcgctgattgtcagtttgattgccagctatcttaagcgtacccagcgaggccgatggattgtgtgatgtggattggcgtgttgcttgccgctgcgttgtgcctgggcttgggtatcttcattaacgaaaccaccggcgaatttccgcaaaaagaacaggaactgtttgaaggtatcgtggcggtgatcgccgtggtgatccttacctggatggttttctggatgcgcaaagtgtcgcgcaacgtcaaagtgcaactggaacaggcagtcgatagcgcattgcagcgtggaaatcatcatggctgggcgctggtgatgatggtcttttttgccgttgcaagggaagggctggagtcggtctttttcctgctggcggcatttcaacaagatgtcgggatctggccgccgctgggtgcaatgctcggtcttgctactgccgtggtgctaggcttcctgctctactggggcggtattcgcctcaatcttggtgcattttttaaatggaccagcctgtttattctcttcgtcgccgcagggctggcagctggtgccattcgcgcatttcatgaagccggattgtggaaccactttcaggaaatcgccttcgatatgagtgcggtgctctcaactcactcgctgtttggcacgctgatggaagggatttttggctatcaggaagcgccgagcgtcagcgaagtcgccgtctggtttatttatctcatcccggcgctggtggcatttgctctgccaccacgcgcaggggcgacagcgtctcgctccgcgtaacaaatacgacgcaaactcttgcttagttacaacatactttaaagggatagtctcgtcatgaccattaacttccgccgtaacgcattgcagttgagcgtggctgcgctgttttcttctgcttttatggctaacgccgctgatgtgccgcaggtcaaagtgaccgtgacggataagcagtgcgaaccgatgaccattacggttaacgccgggaaaacacagttcattattcagaaccacagccagaaggcgctggagtgggagatcctcaaaggcgtgatggtggtggaagagcgggaaaatatcgcccctggctttagccagaaaatgacggcgaatttacagcctggcgaatacgatatgacctgcggtctgctgactaacccgaaagggaagttgatcgtcaaaggtgaggcaacggcggatgcggcgcaaagtgatgcgctgttaagtcttggtggtgcaattactgcatataaagcgtatgtcatggcggaaaccacgcagctggtgaccgacaccaaagcctttaccgacgcgattaaagcaggcgatatcgaaaaagcgaaagcactgtatgcaccgacgcgccagcactatgagcgtattgaaccgattgctgaactgttctccgatctggatggcagcattgacgcccgtgaagatgattacgagcaaaaagccgccgacccaaaattcactggtttccaccgtctggaaaaagcattgtttggcgacaacaccaccaaagggatggatcagtacgctgagcagctttataccgatgtggtcgatttgcaaaaacgcatcagtgaactggctttcccacctagtaaagtggtcggcggcgcagccggactgattgaggaagtggcagccagcaaaattagcggtgaagaagatcgctacagccacaccgatctgtgggatttccaggctaacgttgaaggcagccagaaaattgtcgatttgctgcgtccacaactgcaaaaagccaacccggaactgctggcaaaagtcgatgccaactttaaaaaggtcgataccattctggcgaaataccgtactaaagacggttttgaaacctacgacaaattgaccgatgccgaccggaatgcactgaaaggaccgattactgcgctggcggaagatctggcgcaacttcgcggtgtgctgggactggattaagcgttatgcagtataaagatgaaaacggcgtgaatgaaccgagtcgccgacgtttactgaaagtgataggtgcactggcgctggcgggaagttgtccggtcgctcatgcacaaaaaacgcaaagtgcgccgggtacgcttagtccggatgctcgcaatgagaaacagccgttttatggtgagcatcaggcagggatcctgacgccacaacaggccgcaatgatgctggtggcgtttgatgtgcttgccagcgataaagccgatcttgagcggttgtttcgcttgttgactcagcgttttgcttttctgactcagggcggagcagcaccagaaacgccaaatccgcgcctgccaccactcgattccggcattcttggcggctacattgcgcccgataatctcaccatcacgttaagcgtgggtcacagtttgtttgatgagcgctttggccttgcgccacagatgccaaaaaagctgcagaagatgacgcgtttccccaacgacagcctggatgcggcgttatgtcatggtgatgtgttgctacagatttgcgccaacacccaggacacggttatccatgcgctgcgcgatatcatcaaacacacgccggatttgctcagtgtgcgctggaagcgggaagggtttatttccgatcacgcggcgcgtagtaaaggcaaagagacgccgattaatttgctgggtttcaaagacggcactgccaatcccgatagccagaatgataagttgatgcaaaaagtggtgtgggtaacggcagatcagcaggagcctgcgtggacaatcggtggcagctatcaggcagtacgcttgattcagtttcgagtggaattttgggacagaacgccgctgaaagaacagcagacgatttttggccgtgataagcaaaccggtgcgccgctgggaatgcagcatgagcatgatgtgcctgattacgccagcgacccggaagggaaggtgatcgcgctggacagccatatccggctggcgaatccccgcacggcggagagtgagtccagcctgatgctgcgtcgtggctacagttatagtctgggcgtcaccaactccgggcaactggatatggggttgctgtttgtctgctaccaacacgatctggaaaaaggcttcctgacagtacaaaaaaggctcaatggcgaagcgctggaggaatacgttaaacctatcggcggcggttatttttttgcgctgccgggggtgaaggacgcgaacgattatttcggaagcgcgttattgcgggtttaatgtttttaggcggataaggcatttgtgcgcagatgcctgatgcgacgcttgcgcgtcttatcatgcctacaatcagtgcgggtttggtaggctggataaggcgttcacgccgcatccggcgatcgtgcactgatgcctgatgcaaatcctgctgaaagcacacagcttttttcatcactgtcatcactctgtcatctttccagtagaaactaatgtcactgaaatggtgttttatagttaaatataagtaaatatattgttgcaataaatgcgagatctgttgtacttattaagtagcagcggaagttcccggcagtgatagtcagtcactatggagatcgcggatggtaacgtcctgtactggacatgttttagataatcaacgcgccaccactcgcggagttttctcctccggtagtcatctcgtcactttgcattttcaacctcatcctttctttagttgtgttaccgacgccgtaaacggtgcgcgtagccgttttagcgcattttatccaaaagcaaactatggcttacaaggaagccaaccctctgatgttcgtgcgcataatcgcgctgccaacggcgcgtgtgatgaatacaaacaactcaaggtgctctccatgggaagacaaaaagcagtgatcaaagctcgtcgcgaggcaaaacgtgtgctgagacgggatagccgcagccataagcagcgtgaagaagaaagcgtcaccagccttgtgcagatgggcggcgtagaagccattggtatggcccgcgacagtcgcgatactagccccatcctcgcgcgaaatgaagcgcaattgcactatctgaaggctattgagagtaagcagctgatattcgccacgggcgaagccgggtgcggaaaaacctggatcagcgcagcaaaagcggcagaggccctgatacataaggatgtcgacaggattatcgtcacccgtccagttctgcaagccgatgaagatcttggcttcttacctggagatatcgcagaaaagtttgctccctattttcgcccggtctacgacgtgctggtccggcgcttaggggcttcctttatgcagtactgcctgcgaccggaaatagggaaggtggaaattgcgccgttcgcctatatgcgtggacgtacctttgaaaatgcagtcgtcattcttgacgaggcgcagaatgtgactgccgcgcaaatgaaaatgtttttaacccgcctcggggagaacgtgacggttatcgtcaacggtgatatcacgcaatgcgatttgcctcgcggcgtgtgctccggattaagtgacgcgctggaacgtttcgaagaagatgaaatggttgggatcgtccggttcggtaaagaggactgcgtacgtagcgcactttgccaacgtacgctgcatgcctacagttaagtgtgttatcggtgcagagcccgggcgaaccgggctttgttttgggtgttcccggtgtgtgcaatatacgaaaaaaaagcccgtactttcgtacgagctcttctttaaatatggcggtgagggggggattgactcgcttcgctcgccctgcgggcagcccgctcactgcgttcacggtctgtccaactggctgtcgccagttgtcgaaccccggtcggggcttctcatccccccggtgtgtgcaatatacgaaaaaaaagcccgtactttcgtacgagctcttctttaaatatggcggtgagggggggattcgaacccccgatacgttgccgtatacacactttccaggcgtgctccttcagccactcggacacctcaccaaattgtcgttcctgtcttgctggaacgggcgctaatttagggaaatcatgacctgaggtcaacaaactttttgaaaaaatcgcgcgtttattcaaacttcaatcaatgtgtggttttaataagcgaaatctgctttttttgccaccgaccacggatttgttatgctggtggcctttgtagatcataacgataagtgcgaataaatttcgcacaacgcttttcgggagtcagtatggatatcatcttttatcacccaacgttcgatacccaatggtggattgaggcactgcgcaaagctattcctcaggcaagagtcagagcatggaaaagcggagataatgactctgctgattatgctttagtctggcatcctcctgttgaaatgctggcagggcgcgatcttaaagcggtgttcgcactcggggccggtgttgattctattttgagcaagctacaggcacaccctgaaatgctgaacccttctgttccactttttcgcctggaagataccggtatgggcgagcaaatgcaggaatatgctgtcagtcaggtgctgcattggtttcgacgttttgacgattatcgcatccagcaaaatagtagccattggcaaccgctgcctgaatatcatcgggaagattttaccatcggcattttgggcgcaggcgtactgggcagtaaagttgctcagagtctgcaaacctggcgctttccgctgcgttgctggagtcgaacccgtaaaagctggcctggcgtgcaaagctttgccggacgggaagaactgtctgcatttctgagccaatgtcgggtattgattaatttgttaccgaatacccctgaaaccgtcggcattattaatcaacaattactcgaaaaattaccggatggcgcgtatctcctcaacctggcgcgtggtgttcatgttgtggaagatgacctgctcgcggcgctggatagcggcaaagttaaaggcgcaatgttggatgtttttaatcgtgaacccttaccgcctgaaagtccgctctggcaacatccacgcgtgacgataacaccacatgtcgccgcgattacccgtcccgctgaagctgtggagtacatttctcgcaccattgcccagctcgaaaaaggggagagggtctgcgggcaagtcgaccgcgcacgcggctactaataaagcatcaggattcctgctatccttggcgggaattgaatacaggagagagttatgtatcccgtcgaccttcatatgcataccgttgccagcacacatgcatatagcacattaagtgattacattgcccaggccaaacaaaagggcattaaactttttgcgatcaccgatcatggcccggatatggaagatgcgccgcatcactggcacttcattaacatgcgtatctggccgcgagtggttgatggggtagggatcctgcgcggcatcgaagctaacattaaaaatgttgatggtgaaattgactgcagcggtaaaatgtttgacagcctggatctaattattgccggttttcatgagccggtttttgcgccacatgacaaagcgaccaatacacaagcgatgatcgccactatcgccagcggcaatgtgcatataataagccatcccggaaatcccaaatatgaaatagatgtgaaagccgttgctgaagcagccgcgaaacatcaggtggcgctggaaatcaataattccagttttttacacagtcgtaagggcagtgaagacaactgtcgtgaggtagccgcagcggtacgtgatgctggaggttgggtggcattaggcagcgattctcacaccgcgtttaccatgggggaatttgaagagtgtcttaaaatcctcgacgcggtagattttccgccagagcgcattttgaatgtttctccgcgccgcttactgaacttccttgaatctcgcggtatggcaccgattgcggaatttgcagacctttaattactagtaatggaaatatattaatgaacgagttttctatcctctgtcgtgtgctgggtagcctctattaccgccaaccacaagatcctttactggtgccgctgtttaccctgattcgtgaggggaaactggctgcgaactggccactggagcaggatgagttgctgacacgtttgcagaaaagctgtgatatgacgcaagtctctgccgattacaatgcgttgtttatcggcgatgaatgtgctgtgccgccatatcgtagcgcatgggttgagggcgcgacggaagcggaagtgcgcgcttttctttctgagcgagggatgccattagcggatacgccagccgatcacatcggcacattgctgctcgcagcttcctggctggaagatcagagtacggaagatgagagcgaagcactggaaacactgttcagtgagtatctgttaccctggtgtggtgcgttccttggcaaagtggaggcccatgcaaccacgcctttctggcgcaccatggcaccgctaacccgcgatgccattagtgcaatgtgggacgagctggaagaagattctgaagaataagtgtgatctacgtcactcataactgcaacggataatttgttgttgcataaaatgtgtgctcgatctcattcatggccgcgttttctgctatcatgcgcggcatgaacatacttctctctattgcaatcacaacaggcattctctccggtatctggggatgggtggctgtttccctgggcttactaagctgggcgggcttcctgggctgtacggcctactttgcctgcccgcaaggtgggctgaaagggctggcgatctccgctgcaaccctgcttagtggcgtggtgtgggcgatggtcattatttacggtagtgcactggcaccacatctggaaattctcggttatgtcataaccggtattgtcgcgtttctgatgtgtattcaggccaaacagctgctgcttagttttgttccggggacgtttataggcgcatgcgcgacgtttgccgggcagggtgactggaaactggtgttacctagcctggcgcttgggctgatatttggttacgcaatgaaaaacagtggcctgtggctggcggcgcgtagtgcaaagacggcgcaccgtgagcaggaaatcaaaaataaagcgtgaggggcactcacgctttcgcttaaacagtaaaatgccggatgataattccggcttttttatctgtcaggattccggtggaacgctcatatggcggtatttcaccagaatgtcattctgccgttctgctttattttgcaaatcccacagaccacggtcgataccatcattaatcaggaaaatgacccctgtttcgatagcgctcatcaggcacagcataacaggttcgttgctggtgtaacccacttccccttcaagcaagcgctggtagtcaataaagcggaaaaccccggcctgaacttcataggaaagtatcgtcttactggtgttcacgctagaaaggatctcgccggtactcacattgacgacgcgcaggttcacggcaatctgatcgagctggtattgcgtgtcggcaccgatgccaaaatatcttgccccaaccccgccagatttgacgttgctttcataaccgataatgctaccttcaaccatgatatttgccgccgttaaagattgcagcgggattcggttattaatggcaaccgtgccgttttcttgtgccgcacgaataatcttgcgctcgttaagcaggttttgtaagccctggcgctccagcggtataaaccagcgagaatctttcagtgccgtgaccagcattgccgtggcgctttgcggaacagcagtggagaagttacttgccgggtagggtttaaattgcccggtttcgtcctgaatgttgtatacgctaacaaagattttacccgtcggcgctggcagatgggtcaaatctttgtagctctgagcacgaggcattaatgtcggtctggcggcttctttaggcggggcggttaagcatccgctcagtaacatgacggcaaccaaaagaaataagcgctgcatgattattttccttatgaagctggggcttaaaaatcggtactgttattttgtaaaccgctaacctggatggtgctggtttgtccggttttacgatctgtcacgttcaactgcaattgaccatcgcggttggcaatatcgacaatataatcgttggtcaccatgcggcccggtttaccggtattaatattgctcagtagcccacctaaaatttgactctggatggcctgagtaaagttatctaacgcactgggtgtttcaataccaaagtcatcgttatagctcggatctttataagagttttgggcctgagcgctatttaataaaaaagcgccattatttgggttaccaccaaagtttggattacggaactggaaagtcatggttccagcccaacttaatgggctaataagcatgagtagaactactgcatgtttgacacgcattgcagcctccgaacaattttttatttagaattcatcatgcgccaaatcgcccgtacttaataacgcctgatttatctggcgacgatttagtgcttcttcagtttgaatcagtgcaaagacgacagttttctcgaagtctcttttcaacggaaataaaaaagtctggaaaataacgtcctgattgaccgttatagtgatccagcttccccatcgtgcactgggcctttcattaatcgttaagttacccgtatagtcactttcccatttatcactaaaggctcggtaaaaatcatggccaatagaactaacagtatggtcagttagcaatcccgggacttctacctcaacggcgtgaagattccctgcggcgaacagaaattctgccgccacaatccagcgtaaataacgtttcatggctttatcgcctgaggttatcgtttgcccaggaaaccgcttgtgtccggttttttacggctatcttcttgaaaagattataaagatgcgttttaaccgtattttcgctgatgaacaagctacgagcgatctcgttattagacgcgccgatacgcagcttattcaggatctctttttcccgatgagtaaggagggcactttccgtgctgttataacgatagttaccactatgcgtaatcaggtagctggcaagcttttgcgtaaagtagcattcgccgcgcaggacgccttgcaacccattgacaacacgttcttgatcctccatggaataaaaaacgccgttgatatgaggccagttttcaatgtcgcggtacgggtaatcttcaggcgtatttagcaacaatattttgatattgttgtttttcctgctcaaagtatcctgccaataatggataagctttttatccgcttccatcatatccagaagaataatagagccactagagatatcgtccagagaacgttgaatattatgtaattttcctgtaattgccaggctttgtttaaggtgctgcaagagagctgtcgcctgcaaagaagatttagtgatcaacaataatgtatgaccatgaatactatggacttcattaaacatgatgaaaccccgctttttttattgatcgcacacctgacagctgcctctaaaatagaagcaccagaagtactgacagatgttgcactgctgtgtgtagtaataaatcagccctaaatgggtaaaatataaaactaatggattacatctgatttcaatctagccattacaaatcttaaatcaagtgttaaacatgtaactaaatgtaactcgttatattaaaatgttaaccttaaggttttattaagtttagaaatgatagaaaagttgtacatttggtttttattgcacaattttaaaaaatcatacaaatggtgataacttactaataatgcatataaaaaatatttcggtgtagtcctttcgtcatgtaaaacgttcttgttttttctccacacctccgtggacaattttttactgcaaaaagacgaggtttgtcacggcttgtgcgcaagacatatcgcagcaatcagcgacgggcaagaagaatgactgtctggtgctttttgatagcggaaaacggagatttaaaagaaaacaaaatatttttttgcgtagataacagcgtatttacgtgggttttaatactttggtatgaactaaaaaagaaaaatacaacgcgcgggtgagttattaaaaatatttccgcagacatactttccatcgtaacgcagcgttaacaaaatacaggttgcgttaacaaccaagttgaaatgatttaatttcttaaatgtacgaccaggtccagggtgacaacatgaaaaacaaattgttatttatgatgttaacaatactgggtgcgcctgggattgcagccgcagcaggttatgatttagctaatagtgaatataacttcgcggtaaatgaattgagtaagtctagttttaatcaggcagccataattggtcaagctgggactaataatagtgctcagttacggcagggaggcagtaaacttttggcggttgttgcgcaagaaggtagtagcaaccgggcaaagattgaccagacaggagattataaccttgcatatattgatcaggcgggcagtgccaacgatgccagtattagccaaggtgcttatggtaatactgcgatgattatccagaaaggttctggtaataaagcaaatattacacagtatggtactcaaaaaacggcaattgtagtgcagagacagagccaaatggctattcgcgtgacacaacgttaatttccattcgacttttaaatcaatccgatgggggttttacatgaaacttttaaaagtagcagcaattgcagcaatcgtattctccggtagcgctctggcaggtgttgttcctcagtacggcggcggcggtaaccacggtggtggcggtaataatagcggcccaaattctgagctgaacatttaccagtacggtggcggtaactctgcacttgctctgcaaactgatgcccgtaactctgacttgactattacccagcatggcggcggtaatggtgcagatgttggtcagggcagtgatgacagcagtatcgatctgacccaacgtggcttcggtaacagcgctactcttgatcagtggaacggcaaaaattctgaaatgacggttaaacagttcggtggtggcaacggtgctgcagttgaccagactgcatctaactcctccgtcaacgtgactcaggttggctttggtaacaacgcgaccgctcatcagtactaatacatcatttgtattacagaaacagggcgcaagccctgttttttttcgggagaagaatatgaatacgttattactccttgcggcactttccagtcagataacctttaatacgacccagcaaggggatgtgtataccattattcctgaagtcactcttactcaatcttgtctgtgcagagtacaaatattgtccctgcgcgaaggcagtagtgggcaaagtcagacgaagcaagaaaagacccttagtttgcctgctaatcaacccattgctttgacgaagttgagtttaaatatttccccggacgatcgggtgaaaatagttgttactgtttctgatggacagagtcttcatttaagtcaacaatggccgccctctagtgaaaagtcttaatttgttgaaatatcgagcataagatgaatctggagagaatggtctgctgcgaatcagccaacctgaaagtatggataacacaaccctcaaggatgactaatcattgaggaaatagaataaatgttcagaccttttttaaactctcttatgctcggcagtttgttttttccttttattgccattgctggaagcaccgtgcaagggggcgtgatccatttttatggccaaattgtggaaccggcatgtgacgtcagcacccagagtagtcccgtagaaatgaactgcccacagaatggttctattccgggcaaaacctactccagcaaagcgttaatgagcggcaatgtcaaaaacgcgcaaatagccagtgtaaaagtgcagtatcttgataaacagaaaaagctggctgtaatgaacatcgaatataactaagtttctgaacaactcacgttgctgagcagaaaaatgcgatttaaccaaaaagcctgctgtacacttaagaaacaagaaggtgtaaggaggcgttatgaaaacgcgtattcatgttgtgcagggtgatattaccaaactggccgttgatgtgattgtgaatgcggctaatccgagtttaatgggaggcggcggcgtcgatggggccattcatcgcgcagcgggtccggccctgctggatgcttgtttaaaagtcaggcaacagcagggcgattgccctacggggcatgccgttattacgcttgcaggcgatcttcccgctaaagccgtagtgcacaccgtcgggccagtctggcgtggtggtgaacaaaacgaagaccagcttttgcaggatgcctatctcaatagcctacgactggtggcggcaaacagctatacgagtgtggcttttcctgcaatcagtactggggtttatggttaccctcgtgcggcagcggctgaaatcgcagtaaaaaccgttagtgaatttattacccgtcacgctttacccgaacaggtatactttgtctgttatgatgaagaaaacgcccacctctacgaaagactccttacccaacaaggagatgaatgatttgccccggctggcgagcgcggtgctgccactgtgtagccaacatcccggtcagtgtggcctttttcctctggagaaaagtctggatgcgtttgccgcccggtatcgtctggccgaaatggcagagcatacgctcgatgttcagtattacatctggcaggacgatatgagcggtcggttactgttttccgccctgttagccgcagcaaagcgtggcgttcgcgtccgtttgttgctggacgacaacaatacgcccggacttgacgacattttacgcttgcttgacagtcatccacgcattgaagtccggctttttaatcctttcagctttcgcttgctgcgtccgcttggttatatcaccgacttttcccgtcttaatcgccgtatgcacaataaaagtttcactgtcgatggcgtggtgaccctggtgggaggacgaaatattggtgatgcctattttggagcaggggaggagccactttttagcgatttagatgtcatggcaataggacccgtggtagaggacgttgccgatgatttcgcccgctactggtattgcaaaagcgttagtcccttacagcaggtgctggatgtcccggagggtgaaatggcggatcgcatcgagttacccgcctcctggcataacgatgccatgacgcatcgttatttacgcaaaatggaatccagtccatttataaatcatctggttgatggaacattgccgcttatctgggcgaagacacgtttattaagtgatgatccggcgaaaggggagggcaaggcaaaacggcatagtctgttaccgcagcgcctgttcgatatcatgggcagtcccagtgaacgcatcgatattatctcttcctattttgtaccgacacgcgcaggtgtggcgcaactcttacggatggtgagaaaaggggtaaagattgcgatcctaaccaattctcttgccgctaacgatgttgctgtcgtccatgccggatacgcgcgctggcgcaaaaaattgctccgctatggcgtggaattatatgaactcaagccgacgcgtgaacaaagtagtacgttacacgatcgcggcataaccggtaattccggagccagcctgcatgctaaaacctttagcatcgatggtaaaacggtgtttatcggctctttcaatttcgatccgcgtagtacattgctcaatactgaaatgggcttcgtgatagagagcgaaacgctggcacagttaattgataaacgctttattcagagccagtatgatgcggcctggcagctccgtctggacaggtggggacggatcaactgggttgatcgtcatgcaaagaaagagattattctcaaaaaagaacccgccaccagtttctggaagcgggttatggtcagactggcgagcatattgcccgtggaatggttattgtaaatgtggcttaacgggctggtgctttatcgttctcacgcttaacaaccggtttaccagagaacaaaaacttcagtaacgggatgcgcaaatgaatttcatacagaattatcgcaatccctactacaaatatcaggccacagagaaaaccaagccagttggaggtgatgtgcggtgtaatgtatgcgccgaaaaacagcgttaacgggtggtgaaccagatagataaacaggcttgcgttaacaaaataagtcacccgcgcactctggaagttaagcaaacggtggccaaaggagaagaccacattcaccatccacagaccgaggaccatggtgatcacgctctcggtttcgtacatccaggcatcgccactgccatagcgctggttgagtaaataagcgacaaacgccaatgctgctgcaagggtacagccacgagacggcgtggtaaacaaggctttaagatgagggaaaatgaaagccagtgcgccgaggataaagaacggcaaataaaacagcgtttgcatgacaataaaattgaacatgccattactcagaatgggcggatacacaataaaaatcgttcttcttattaccgcataaccgatgccgaggcataaaaaaatcacgcttagttttaccatgctgaattttttattcgttttatcagaattttctaaattatttctgatgcgcttaaatatccatacgcacagcgtcgtcatgaccactaacaccagtaaaaaccacaggtgacttattaattcccaggccaacgtattatatttgtcatacaaactcagcccaggccaactttccgcttttcctttgacatattgcagcataataaattgcggtaatgtcagtagggggatggctgttaacatcgggatacctacacgttcgacacgtactttccaccattttttcaagggatagcgtaaaaaaagcatgtaggaaaagtagccggatataacgaaaaatacctgcatgcggaagctgtggatgaagtcattaaaaagggtcagccacaaactactttcggcgctattcacatgccatgtatggctgctatagattaaagaaatatgaaaaggtatccctaacaacatcagccaggcgcggatggagtcgaggaaatattcacgttgcgcgggtactgggttcatatatggttaactaatctcggatttttcgtcttatccctgtcgggttatgcctttaggcttgttgccatagtgacaccgacctgaccgcgccaggcgcaggcttcaaggtttttatgcatagcatcatcgctaccactaaccagaatggaagcgtctgtaagacggttgataaataaatttgctggcaaaccctacacgaagtcgatgcttctgtctttaggagaagcacggaaagtgaaaacggttgcaatcaggtgcttaatccatgagccagcgtgctgaacgataccgggattctgttgtcggaatggctggttatccattaaaatagatcggatcgatataagcacacaaagggggaagtgcttactaattatgaaacataaactacaaatgatgaaaatgcgttggttgagtgctgcagtaatgttaaccctgtatacatctagtagctgggctttcagtattgatgatgtcgcaaagcaagctcaatctttagccgggaaaggctacgagacgcccaaaagcaacttgccctccgttttccgcgatatgaaatacgcggactatcagcagatccagtttaatcatgacaaagcgtactggaacaatctgaagaccccattcaaactcgagttctaccatcagggtatgtacttcgataccccggtcaaaataaatgaagtgactgccaccgcagtcaaacgaatcaaatacagcccggattatttcactttcggcgatgttcagcatgacaaagatacggtaaaagaccttggctttgccggttttaaagtgctttacccgatcaacagcaaagataaaaacgatgaaatcgtcagcatgctcggggccagctatttccgcgtgattggtgcaggtcaggtttatggcctttctgcccgcggcctggcaattgataccgccttgccaagcggtgaagaatttccgcgcttcaaagagttctggatcgagcgtccaaaaccgactgataaacgtttaaccatctatgcattgcttgacagcccgcgtgcgacaggtgcttacaaattcgtggttatgccagggcgtgacacggttgtggatgtgcagagcaaaatctatctgcgcgataaagtcggcaaactgggggttgcaccgttaaccagtatgttcctgtttgggccgaaccaaccgagccctgcaaataactatcgtccggagttgcacgactctaacggtctctctatccatgccggtaatggcgaatggatctggcgtccgttgaataacccgaaacatttagcggtcagcagcttctccatggaaaacccgcaaggctttggtctgttgcagcgcggtcgtgatttctcccgctttgaagatctcgatgatcgttacgatctccgtccaagcgcatgggtgactccgaaaggggagtggggtaaaggcagcgttgagctggtggaaattccaaccaacgatgaaaccaacgataacatcgtcgcttactggacgccggatcagctgccggagccgggtaaagagatgaactttaaatacaccatcaccttcagccgtgatgaagacaaactgcatgcgccagataacgcatgggtgcaacaaacgcgtcgtagtacgggggatgtgaagcagagcaacctgattcgccagcctgacggtactatcgcctttgtggtcgattttaccggcgcagagatgaaaaaactgccagaggataccccggtcacagcgcaaaccagcattggtgataatggtgagatagttgaaagcacggtgcgctataacccggttaccaaaggctggcgtctggtgatgcgtgtgaaagtgaaagatgccaagaaaaccactgaaatgcgtgctgcgctggtgaatgccgatcagacgttgagtgaaacctggagctaccagttacctgccaatgaataagacaactgagtacattgccgaagactgatatccgcgccgttcatcaggcgctggatgccgaacaccgcacctgggcgcgggaggatgattccccgcaaggctcggtaaaggcgcgtctggaacaagcctggccagattcacttgctgatggacagttaattaaagacgacgaagggcgcgatcagctgaaggcgatgccagaagcaaaacgctcctcgatgtttcccgacccgtggcgtaccaacccggtaggccgtttctgggatcgcctgcgtggacgcgatgtcacgccgcgctatctggctcgtttgaccaaagaagagcaggagagcgagcaaaagtggcgtaccgtcggtaccatccgccgttacattctgttgatcctgacgctcgcgcaaactgtcgtcgcgacctggtatatgaagaccattcttccttatcagggttgggcgctgattaatcctatggatatggttggtcaggatttgtgggtttcctttatgcagcttctgccttatatgctgcaaaccggtatcctgatcctctttgcggtactgttctgttgggtgtccgccggattctggacggcgttaatgggcttcctgcaactgcttattggtcgcgataaatacagtatatctgcgtcaacagttggcgatgaaccattaaacccggagcatcgcacggcgttgatcatgcctatctgtaacgaagacgtgaaccgtgtttttgctggcctgcgtgcaacgtgggaatcagtaaaagccaccgggaatgccaaacactttgatgtctacattcttagtgacagttataacccggatatctgcgtcgcagagcaaaaagcctggatggagcttatcgctgaagtcggtggcgaaggtcagattttctatcgccgccgccgtcgccgcgtgaagcgtaaaagcggtaatatcgatgacttctgccgtcgctggggcagccagtacagctacatggtggtgctggatgctgactcggtaatgaccggtgattgtttgtgcgggctggtgcgcctgatggaagccaacccgaacgccgggatcattcagtcgtcgccgaaagcgtccggtatggatacgctgtatgcgcgctgtcagcagttcgcgacccgcgtgtatgggccactgtttacagccggtttgcacttctggcaacttggcgagtcgcactactggggacataacgcgattatccgcgtgaaaccgtttatcgagcactgcgcactggctccgctgccgggcgaaggttcctttgccggttcaatcctgtcacatgacttcgtggaagcggcgttgatgcgccgtgcaggttggggggtctggattgcttacgatctcccgggttcttatgaagaattgccgcctaacttgcttgatgagctaaaacgtgaccgccgatggtgccacggtaacctgatgaacttccgtctgttcctggtgaagggtatgcacccggttcaccgtgcggtgttcctgacgggcgtgatgtcttatctctccgctccgctgtggtttatgttcctcgcgctctctactgcattgcaggtagtgcatgcgttgaccgaaccgcaatacttcctgcaaccacggcagttgttcccagtgtggccgcagtggcgtcctgagctggcgattgcactttttgcttcgaccatggtgctgttgttcctgccgaagttattgagcattttgcttatctggtgcaaaggaacgaaagaatacggcggcttctggcgcgttacattatcgttgctgctggaagtgcttttttccgtgctgctggctccggtacgcatgctgttccatacggtcttcgttgtcagcgcgttccttggctgggaagtggtgtggaattcaccgcagcgtgatgatgactccacttcctggggtgaagcgttcaaacgccacggctcacagctgctgttagggttagtgtgggctgttgggatggcgtggctggatctgcgtttcctgttctggctggcaccgattgtcttctcgttgatcctgtcaccgtttgtttcggtgatttccagccgtgccaccgttggtctgcgcaccaaacgctggaaactgttcctgatcccggaagagtattcgccgccgcaggtgctggttgataccgatcggttccttgagatgaatcgtcaacgctcccttgatgatggctttatgcacgcagtgtttaacccgtcatttaacgctctggcaaccgcaatggcgaccgcgcgtcaccgcgccagtaaggtgctggaaatcgcccgtgaccgccacgttgaacaggcgctgaacgagacgccagagaagctgaatcgcgatcgtcgcctggtgctgctaagcgatccggtgacgatggcccgtctgcatttccgtgtctggaattccccggagagatattcttcatgggtgagttattacgaagggataaagctcaatccactggcattgcgtaaaccggatgcggcttcgcaataaaaacgtagttgcctgatgcgctacgcttatcaggcctacatcgttcctgcaatttattgattttgcaagactttgtgggtcggataaggcgttcacgccgcatccggcaaaaacaacgagccaataaaaataccggcgttatgccggtatttttttacgaaagaggtatcaaatgcgtttaattgtggtgagcatcatggtgaccttgctgagtggctgtggcagcattattagtcgcactataccggggcaggggcatggcaaccaatattatcccggtgtgcaatgggatgtgcgtgactccgcctggcgttatgtcacgatccttgatctgccattctctctggtttttgatactttactgctgccgatcgacattcatcatggcccgtatgagtgattaacgttcatcccactcatcagctgctgcgcgtccttcctcggtatccagcggtggctcaagctgaaattccccctcgtcccattcatgtaatgtattctcttcctgccactcctggcgtatctctatctcatcatagtcgccatcaaaaacactttgcgcggcttcaccgctaagcataggtaaacattcaccttcttccccttcgtcggcaaaaaactcaacttgccacatgatgtcgccgtcctgcaaaacgtatttttgggcattgaactgttgcacattcgcatcttcggcgtcgatgccggggttgtctgcaagaaattcttcgcgtgcagcgtcaatggcttcttcaagcgttgcgtacatggtcatcacgattctccctttgagttgatgaggtttcagggaaaaggatagctgattctccgcttttgcaagtatgaaaggcgaaaaatcagttgcttacctggggtattcgacgacgacgtagactgttccaactatagactgcgttgaataacactacgccagcggtgacgagaaataccgctctgaaaccgtagttcgcactaatcgctgctcccatcaatggtccggtaacgttgccaatatcacgaaagctttggttatagctgaagatacgcccggcgatctggttgctgctgttgtaaaccaacagtgtctgtacggcggggagtagtgcaccatcggcggcaccgagcaaaaaacgtaaaatcccaagttgcaatggcgtctgaacgtaagacattgggatcaacagcagtacagaaaagatcagcgctgtaatcaggatcttttcgggtccgattcgatcgccaagtttgccgagtcgtggtgcacttagcagagccgccacgcctggcacgctggcgatcatgccactgataaaggcgacgttactgacgttacccgccagttcgcggacatacagcgtcagaatgggggcaatactgcccgtcgccacctggatgattaacgtagtgacaaacaggctgagtaccagtttcgggtttttaagacttgtcaccacttcccgcatgtgcagcatctcttttttgctgaccggctggaatttttctctgatgcaaaacagggtgacgaaaaagcagagtatgagcacactggcggtaataaagaataccggacgtaagccgtagctatcggcgagcaggccgccagccattgggccgagcaacgcaccactaacgccgcctgtggagagcgtacccagcgcccagccgcttttattacgcggtacttgtgtggcgataagagcattagcgttggggacaaatccgccaagtaacccaagaagcgcccgcaggatcaaaaactgccagatattttgtgccagccccatcaacaccatcacgatgcccatgccgagggcagagcgtaatagcatgagttttcggcctttacggtcggcgagtccaccccaaaacggactggcgatggcgctaaataaaaatgtaatgctgaagacaataccggaccacatattcagggcggagtgaccggtaacgccaagctgctcaacgtagaggggtaagaagggcattaccagactgaaggcggcaccggtaagaaaacagcctagccaggcgacgatcaggtttcgtttccagtttataggggtgtcattttcacagggactcatagcaatccgctgttggtgcgccaggcgcggtgaacataagaagaaaagataagcacactaattatgcgcccgacttccagggggcgcaatccagagagcttttatcgctaaatcagggggatttgctgtggtaatgccggatgccattctgaagcatccggcatgggagatttaatagcgactaggaacgccttccgggcgtgttttaaagcgacggtgtaaccacatatactgctctggtgccatcatgatgcatttttcgaccactttgttcatccacgcggcggtagtttcggcatcatccagtggcggagaacactctggcggcagcataatcaattgataccctttgccatctggcttacggcgtggaacgaagggcaccagacatgcgccggacatccgtgccagcatccaggttccggtcgtggtcgcagcctgctcaacggcaaacaacgggacgaaaacgctactgcgcgggccgtaatcatgatccggtgcgtaccagaccacttcgccttttttcagggctttaatcatgccttttaaatctttgcggtcgagcatgcttttattactgcgcaaacggccccaggtttgtagccagtcaatcagtggattatcgttcgggcgataaacgccaatacccggttcctgcataccaaactgccgcgcacccagctccagtgtcagaaaatggatgccaactaacaggatgccgcgtttttgcgcctgcacgtcacgaatgtgttccatgccgatcacttccgtccagcgggcgattcggcggtccggccagaaccacgccatgccggtttccatcaggcccatgccaacggattcgaaattcttcaccaccattttacggcgttcttgttcgctcatttccgggaagcacagttccaggttgcgatgcacaatttttgcgcgtcgtttcataaaacgtaacgccagttttcctaatccacaaccgaggcggtagataaccgggtagggcaattgcacgactaaccaaagtacgccaatacccaaccaggttaaccaataacgcggatgaagcagtgcggtggagaacttgggtagattcgtcatatcaatcctgtttttcaacctattcgggcaattgtatgtattgtcgcattttttcgcccgcaaccaaaatttgtggctgaagactgggcgaaattgccgcgcttgtaaataacaaataatttttaatgcgcaaatgtagcgtaaaatgtgtggatgttaattatcgataattgctatatcatgccgcggatttttactttcccatctcgcaggaaccgtacaccatgccagtgttacacaaccgcatttccaacgacgcgctaaaagccaaaatgttggctgagagcgaaccgcgaaccaccattagcttttacaagtatttccacatcgccgatcctaaggcgacccgtgacgctttatatcagctgtttaccgcgctgaatgtttttgggcgagtgtatctggcgcatgagggcattaacgcgcaaatcagcgtacctgcgagcaatgttgaaacatttcgcgcgcagctctatgccttcgacccggctttagagggtttacgcctgaatatcgcgttggatgatgacgggaaatccttctgggtactgcgcatgaaggtacgcgatcgcattgttgccgacggtattgacgatcctcactttgatgccagcaatgttggtgagtatctgcaagcggcggaagtgaacgccatgcttgacgatcccgatgcactatttatcgacatgcgtaaccactatgagtatgaagtggggcactttgaaaacgcgctcgaaattccggcagataccttccgtgagcagctgccaaaagcagtcgagatgatgcaggcacataaagataaaaaaatcgtcatgtactgcaccggcggcattcgttgtgaaaaggccagtgcctggatgaaacataacggattcaacaaagtctggcatatcgagggcggaattattgaatacgcccgtaaggcgcgcgagcagggcttgccggtgcgttttattggcaaaaattttgtttttgacgagcggatgggcgaacgtataagcgatgagattatcgcgcattgccaccagtgcggcgcgccgtgcgacagccataccaactgtaaaaatgatggctgccacctgctgtttattcagtgtccagtatgcgcggaaaaatacaaaggttgttgtagtgagatttgctgcgaagaaagcgcgttaccgccagaagaacagcgacgccgtcgggcaggacgtgaaaatggcaataagatctttaataagtctcgtggacgtctgaatacaacactgtgcattcctgatccaacagaataaatatcattgccggatgcgtgccatccggcaacatttcacgcttacttctgctgtacgccttccacactaataatcagatccacttcctgagaagctggacctaaatctgtcttgatattgaagtccttgagcttaattttgccttcggcctcgaagcctgcacgtttaccaccccatgggtcgtcgccctgaccaattaatttcgcttccagcgtgacgggtttggttacgccattcagcgtcagatcgccggtaatatccagttcgtcaccgtctttcttcacgctggtggaggtgaatgttgcctgtggatattttgcggtattgaggaaatctgcactgcgaagatgtttatcgcgttcggcgtgattagtatcgacgctggtggtgttaattgtcacattcactttatcggcagccggatttttttcgtcaaaggtaaaagtaccgtcgaaatctttaaaggtgccgtataaccagctatagccaaggtgctggatgcggaaattaacaaaggcgtgctgaccttctttgtcaattttgtaatcggcggcaaccgcactaccggcagagaacatcagggacgcgaaggttaaaccaagcaggctttttttcattttttatactccatagtcagaactgctctttcccagcatgcgcttcagagtgtcgtctttatcgatgaaatgatgcttcagggccataaatccgtgcataacggacagtactacgacgctccacgcgagccaaaaatgcagggcaccggcaaagtctgcctgtgcgccagcgtcggcaagggtcgcggggacgtcaaaccagccaaaaacgctgatcggtttaccatcggcagtactgatcagatagccgctgatgccgatggcgaaaagcaataggtacaatgcgagatgtccagctcttgcggcaagacgagtcatggggctataactcggcagcggacccggcggtggagatatgacacgccacagaacgcgaataaccagccccatcattaacaaaataccgatgcttttatgcagttcgggtgctttgtgataccagccatcgtaataactgagcgtgaccatccacagacctaaagcaaacatgccgtagacaataattgcgcttagccaatggaaggccgcagatataacaccatagcgttcaggggtatttgtgaaactcataagtgcatccaaaacgaatttgcgagagaaagaaaatggcgtgtcggagaatgaattgcaacacaaaaataacaaattgaatgatatttatttttatttcaataattttgaattaataatgaaagaatcttcataagtttagtgggttcagcatcagagatgtctggtgagtgctgtagaagcaggaataatctcattcaatttttcacgctaaatgaaagggagattaaatatttgtcagtttatgtcagtgcggaaaattaaaaataaaacacatagatcagatccataattgccaacaatccccagagaaaaagataaagcatcagatgctcgcgaatattattgatgagatagtgcaacagccgacgcattaaatactcctgtaaaaacggcctcattctggaggccgtaatgatgattattggaagcgggaaagcctgaatggcgtcaaatcaaaatcgctttttttgtcttgcgcaaaatcggcagctatttcccctaaaacactcgcaaatttaaaaccgtgcccactcaggccggtaatgagcagtgtattatcgtggccgggtagggtatcgataataaaatcttcgtcagggctattatcataggtgcaggcagcgccgtacaggcagcaaccgatacccggcaatacattgcgcaagaacgggaaggcttcactcccatcactggccacttccgcaaacggaacacgttcatccgcactatggataacctggcctccgttatgtttgccaatcttcaacgcgtcgttttctgccggaaaaccataatattgatcgccattgggcagttcaccggtaaacgccgggaatttattcttcacgctatagcggccatcggcctgataccaggcaaatactttgcgtacgggctggacaggcagctccgggagcaggtcttttacccatgttcccgcgcagacaatcgcttttttcgcctgatactcaccgtcagccgtttcaatagttacgccatcatcgtcatgacgaattgcggtgaccgggcagttgaacagttgcgcacagcccgcttccttcgccagttggatccaggttttaatcgccagttcgctgcgcaaaaaaccggaatcagtttcaaataagccgatgtagttgtccgggacgcgtatttccggccagcgggccataatcccttgcgcatcgagcttttcaacgttgagttgccattgttcggcgctgtgggcgacgttggcgagaaatgtggaatcagccgggccaaggttaatgacgccagagcgtacaaaaatgggatcttcttcgttgtggcgggagagttcatcccacagcgtttgcgcgcggaggaccagcgggacatacttttcgccttcaccataagcatggcgaattaatcgcgtatcgccgtggtggctgccgtgttgatgcggtggcatatgggcgtcggtcattagcacgtttaaaccggcgcgggttgcataatacccggcggcagcgcctacggaaccgctgccaataatgatgagatcgtatttcatttttttctctctgctctcatggtttaagcagagtaattaactgaatgcagatatacaacccagaaatggtaaaggcaccggtgaggtgccttttgggtggatggtcatgtcatgttaatgacgccgatactcgtttacctggaaatcaccggattcaattttggcgattcctgcttctaatatgctaataaattgtctggcaacatcagtggttaaccagagcgtctgaccaacttcagtcccttcctgctcggacttatttggggtctggtagtgcaaacgcaacatcagcgcatcatagctatcaacggtgctgatgtcccaccctacgagcggatgagtctgaatgacttcattatttttttccatcatggccccctaattcgtgttactagacaacgttattcgaggttcaatgcgtttttatctgaagcaacttcagtataccaataagtaagggtattcaccgaatttttaaagggggaaacagataaatttctgcttttaagatttatatgaacaataaaacagcatgtcattcatatttttttagcatattgtgcaattattttgaggaagtgtagaaattttgtactcaaaattcgtaagtaaaataaaaaagccggggcgacccggcaaaaaaaatcactgcatattattcgctgacaaaccagtcatcggcgctttcccacgtttcctggagaatttcactaatgcgctgtttatcttcttttgtcgcgccaataacgcttaaattattcgctgcggcataacgtacgcttacgtggccttcattatcaggaaacgcatactgaatacggcgggaaagttcgccagccagggcgtcaatagccccagctggcaatggagaagttttcgctatggtgacttcaattcgcataatagccccctgttgaatatactggttatttatacaggtaaaataacctaatgacaacaggaagctacgatttttattgtttaacggaccagcgtaccgtttccccggcgaggaatggcaccagcgtgtcatcagtcagtgcgatgctttcagcaacctgttgctcttcacgtaccagttcgatgaatgtgtcgttgaccggcaacccatagaactgcgggccgtttacagaacagaatgcttcaaagtgctgcaaagcattcatttcttcaaagacggtagcgtaactgcccagcgcggttggggcgttgaagcagcccgcgcagccgcaactgctctctttgcgatgacgtgcatgtggcgcagaatccgtaccgaggaatactcgattaaaaccgctggcgaccagttcacgcaatgcctgttggtgaatattacgtttgaggatgggtagacaatacaggtgcggacgcacgcctccaaccagcatatggttgcggttaaacatcagatgctgcggagtgatggtggcagccagccgttcatttccgtcacggacatagtcggcagcatctttggtggtgatgtgctcaaaaacgactttcagcgcagtcaggcgctggcgcagaggttccatcacgctttctataaagcgcgcttcacgatcaaaaatgtcgatatctgcatgtgtcacttcaccatgcaccagtagcggcataccgattttttccatgcgctcaagtaccggcatgattgcgtcaatactcgtcacgccgtggctggagttagtggttgcgtttgccgggtaaagttttgcagcggtgaacacgccttcgttaaatccgcgctccagctcattaggatccaggctatctgttaaataacaggtcatcaatggggtgaaatcgtgcccggcaggtacggcgtcaagaatacgctggcgatacgccacggcagcctcaacggtggtcacgggcggagccagattgggcattacgatagcccgtccataaatttcgctggtatatggcacgacagtttttaacatgtcgccatcgcggaggtgaaggtgccagtcgtctgggcggcggatctttaatacctgggatggtgcagtcattaatctctatgctccggctgaagggatgtttttgccggacacaaaggataagcggaaacgttttcctttgcacgaaaaataaagggcgcgaatgcgccctcgtgattaatcagtaaatggaatgacaatttcgcctggcttcacttcaatgcctttcgccagttttttcgccattgcttcgccctggctgccatcttcgcgcaggacgtaagcaggttgctggttaaagtaattgcgtaatgcctggttcaaatagggaagcaacgtttgcatcaccgtttgcattttttccggttgtaccgtcgcatcgaccacttccatctctttcaggaagatcgcacctttttctttatcaaacacgggcagcgctttcagcttcagtttcatggtcgctttctgactaccgaacagggagttcatgtccagattggcgtctccggttagggtaaccttattcggctcttcgcgaccaatttggctggtcaggtttgtcagaacaatatgggcgtcagccacgccgggtaaaccgatatctttactgaaattattatgtttcgcaaggctctggttaatttcttgttcggtgatggtgtattgggtgagttgattacagccaacgagcaggccactgacgatcaatgcagcggcaaataaaaacttgttcatggtagtcctcgacatgaaatctgcgtcaatatcctgacacaacgcagcatgtgtcaccagcgataaactcgccagcagaaaaaactgaaaacggcggcaacccgcgaatacaggctgccgcggcgggtcaggattaaatcgccatactacttaacaaattgatttgtgtctgtttcgccatattatcgcggtaatcagcaacgcggcttggccagttaattccggctaccagcgtcagattacgcagtagcgggaatagctgaatatcatcttcgctaagttcgccattcacggcgttcggtttgacgatcagtttgtccagcgcacgtaaatcatcgctgatattcttaatcagaccgtcagagtgggccagcaggtcggcaaaattacccgcgctggcctctttcttgtcgacgaaatatttgcgcgcggcgggagtagaaaactcatcaaatgcgcttttggcaaaacgcggcaacagcagtttgttggcgtagccattgaccttgcgcagccactcttcaatggcaggggaacgtttgccggtcagtaacggtttgccgtcgagtttatcgacatagtgaacgatgtccatgctttctggcatatagcggctgtcatctttttgcagaatgggaacctgtttttgaccgaccatccgggtgggtgtttctgcgtcgtcgttgagcagaacatgtaattcgacggggatatttttcaggccgaaaatcatgcgggctttgaggcagtaagggcagtgatcgtaaatgtatagcttcacgtgactcctccatttggctgtcagttcactttcagtatgaaggagtcaggggggagtatcaaatcaggcgtcgcgttcaagcaaacgacgcgcggcgcgtttctggctaaactgccaacccagcgcaaggaaagtgaagatgccaataatgcccagcatcatccacggaagctctggctggtgcgcgcttttgcccaggtcaaacagccagccgccaccgatataaccaatagcgccgccaatcgccagacccagacggctaaaccccatatagctgccgcgagctcttgcgtccgccaggctagcacttaaggtttcacgcgcaggctcggcaatgatgctcccgatataaaacagacaaatcagggtgaaaagttgttgcaggccgctgaccatgcccaccggcatcatgcttaaactcattatcaacagcccagccatcaaccggtgttccagacgaaaatgcttttcactccagcgggcgatagggtagagcaacgttaagctcagacacgcttcaatggcatacatccatttaacggcagagggcgcgccagccacgtcgttgaccataattggcagcatcagcatcacttgtacagccagcatgtagtaacccgccagcgtcagaacataggtgacaaaacgcttgtcacgcatcacgcgggtcatgccttcgcgaacgggcgtgcgtacggtggagagtttccatgctggtaacaaccacgcattgaacgccgcacatagcacaaatagaactgcccctgtggcgcagaccaggcgaaagtcgtattgcaacagccagctccccaacaatgcgccaatgaccgcaccggcactgtcctgcatcatcaacaggctgaaaaaacgaccacgctgctgtggacggattaatttcaccaccagcgcgctacgcggcggatcaaacaacgtgccaccgagtccgctgagcaggcaactaaaccacaatagccacggttcgtgggcgatacccattgtggcgaatccggcggcgcgcatcagcataccggtaacaatcatcggtttggcaccaaagcggtcggcaattgcaccgccgaaaatacccagaccttgctgaataaattggcgtagaccgagagcaataccgaccatgacggcggcccagcccatttgatcaacgaagcggatagagatcagcgggaagacaacaaagaaccccagcacgaccagcatattatcgatgagcaggaaatatttacccaggttcctcgcctggctcacgcgggacatttcccctcccgggaaataaaagatgagcactttctattctgcattgccgctaagacttttcccatcacttcggggacaatatttttttatcaaaacgtcgctttgatagagagtttttatcaaatatgtgaataatgcagaaaatggcattttggacttttcacagggtctggttgcgcaggtatagtaatacttacagcgtattaaagacgttacgggaaggagtaggtatagaatgtttggctatcgcagtaacgtgccaaaagtgcgcttaaccacagaccgactggtcgtgcgtctggtgcatgatcgtgatgcctggcgtcttgcggattattacgcagagaatcgccatttcctcaagccctgggagccagtgcgcgacgaaagccactgttatccaagtggctggcaggccaggctggggatgattaacgaatttcataaacaaggtagtgctttctactttggcttattcgacccggacgaaaaagagattattggcgttgccaatttttccaatgttgttcgtggctcttttcatgcctgctatctcggttatagcattgggcaaaaatggcagggcaaaggactcatgtttgaagccctgaccgcagccattcgttatatgcagcgcacccaacatattcatcgcattatggctaattatatgccgcacaataaacgcagcggtgatttactggcgcgactgggttttgaaaaagaaggctatgcgaaagactatctgttgattgatggacaatggcgcgatcacgtactgacggcattaactaccccagactggacgcccggccgctaaggagaatctcatgaaatatcaacttactgcccttgaagctcgcgtgattggttgcttgctggaaaagcaggtgaccacgccggagcaatacccgctcagtgtcaatggtgtagtcacggcctgtaatcagaaaacgaaccgtgaaccggtcatgaatctgagtgaatccgaagtgcaggaacagctggataatctggtcaaacgtcattatctacgcacagtgagcggttttggtaatcgggtcaccaaatatgagcaacgtttttgtaatagtgaatttggcgatctgaaactgagcgcagcggaagtggcgttaatcaccacgttgttattgcgtggtgcccagacgccaggtgaactgcgcagccgcgccgcgcgaatgtatgaattcagcgatatggcggaagtggagagcacgctggaacaactggcaaatcgcgaagatggtccttttgtggtgcgtctggcccgcgaaccgggtaaacgcgaaaaccgctacatgcatcttttcagtggtgaggttgaagatcagccggcggtgacggatatgagcaacgcggttgacggtgatttacaggcccgcgtcgaagccctggaaatcgaagtggcagaactgaaacagcgtcttgatagcttgctggcccatctgggagattaaagtgaaaaaattacgtatcggcgtagtgggattaggtggcattgcgcaaaaagcgtggttaccggtgctggcggcagcgtctgactggacgttacaaggagcctggagccctacgcgcgcgaaagccctgccaatttgtgaaagctggcgcattccttatgccgatagcttatccagccttgccgccagttgcgatgcggtttttgtgcattccagcaccgccagccactttgacgtggtcagtacgttactcaatgcgggggtacatgtctgtgtcgataaaccgctggcagaaaatctgcgcgatgctgaacggctggtggaactggcggcgcggaaaaaactgacgttgatggtcggttttaaccgtcgtttcgcaccactctacggtgagttaaaaacgcaactcgccaccgcagccagcctaagaatggataaacatcgtagcaatagcgtcgggccacacgatctttatttcacgttgctggatgattatctgcatgtggtggataccgcgctgtggttgagcggcggcaaagcctctctggatggcggtacgctactgactaacgacgctggcgaaatgctgtttgccgagcaccattttagcgctggtcctttgcagatcaccacctgtatgcatcgccgtgccggaagtcagcgtgaaaccgtgcaggccgtgactgacggtgcgctcatcgacattacggatatgcgcgaatggcgtgaggagcgcgggcagggcgtagtgcataaaccgattcctggttggcagagtacgcttgagcaacgtgggtttgtcggctgtgcgcggcacttcattgaatgtgtgcaaaaccagacagttccgcaaaccgccggcgaacaggccgtgctggcgcaacgtatcgttgacaagatctggcgcgatgcgatgagtgaataaaccctgtaacatctggcggtagcaattcaccataatccaggtagactattcgcctctttcagcgcctgccttgcaggcgttttgcccgtgggtctggattagaacaccgatgaatttattaaaaagcctggccgccgtcagcagcatgaccatgtttagccgtgtgcttggcttcgcacgagacgcaattgtcgccagaatctttggcgcagggatggcaaccgacgcctttttcgtcgcttttaaacttcctaacttgttacgccgtatctttgccgaaggggcattttcccaggcatttgtaccgattctggcggaatataaaagtaagcagggtgaagacgccacgcgggtctttgtctcttatgtttctggcctgctgacacttgcgctggcggttgtgacggtcgctggcatgctcgccgcaccgtgggtgatcatggtgaccgcgccaggcttcgctgacacagctgacaaatttgccctgaccagccagctactaaagattacctttccctatatcttgctgatctccctggcgagcctggtgggagcgattctgaatacgtggaaccgcttcagcattccggcgtttgctccaacactgcttaacatcagcatgattggtttcgcgctgtttgccgcaccgtactttaacccaccggtgctggcgctggcgtgggctgttacggtcggcggcgtcctgcagctggtgtatcagctaccgcacctgaagaagatcggcatgctggtcctgccgcgcattaacttccacgatgccggagcaatgcgcgtggtgaaacagatgggaccggcgatccttggcgtctctgtgagccagatctccttaatcatcaacaccatttttgccagctttcttgcttccggtagcgtgtcttggatgtattacgccgaccgcttaatggagtttccgtccggtgtgctgggcgtggcgcttggcaccattttgctgccgagcctgagcaaaagttttgccagtggcaatcatgatgaatacaaccgtttgatggactgggggttgcgtctttgtttcctgttggcgctgccgagtgcggttgcgttgggcattctttccggtccgttgaccgttagcctgttccagtacggtaaatttaccgcgtttgatgcgctgatgacccagcgggcgttaattgcctacagcgtgggtttgattggcctgattgtagtgaaagtgttggctcctggcttttattcccgccaggacattaaaacgccagtgaaaattgccatcgttacgctgattttaacgcaattgatgaacctggcgtttattggtccgttgaaacatgccgggctgagtctttctattggtctggcggcgtgtctgaatgctagcctgctttactggcagttgcgtaagcagaaaatctttaccccgcaacccggctggatggcgtttctgttgcgtctggtggtggcggtactggtgatgtctggcgtgcttttaggtatgttacatatcatgccggagtggagtttgggtaccatgccctggcgtttactgcgtttaatggcggtcgtgctggcggggattgccgcgtacttcgctgcactggcggtactgggcttcaaagttaaagaatttgcccgccggacggtgtaacaatgcattccggcctgcagtgttcgctttaaaacatatcatgaaactgggtatgttttgtctgcctgctctgggatcgctggggcgggcatttttttgcctattttgcattgttggttagcaaggatgccattcgatgaattttaatatgttgattcaaagatgaaataaaaaagccctggcagttaccagggcttgattactttgagctaattattactcaacaggttgcggacgcgcaggagcggcagaggcatgatgtgttgccgtatgaccacctgcggcacctttaccttcgaaggcaaaagtagggcgctgccagtcactgtgacgcggtgcctccggaacatattccggtgctggagcgcgcgtcattggcgcggtagcgtggttatgctcaacggtgacctcaggttcgaccgcagctaccgtttcaacttctgctgcgacttcagcgactactggcgcggcaggttgagcaacaacttcaggttcagcaactacaacctcagcagtttcgacaacttcttcaatatctgccgtctcttcctgcggttcaaccaccggttctgcttgttctgcaacttcctgggctacggcaacatcagactcggtaatcacctgcggctgttcagttaccgcggcagcgatcacttcaggatgcgtcgtttcaaccacttccggttgcggttcggcaacctgaacgggggcttctacgacaccggccacttcttcaacaactggcgcgctaacaaccggttcgatagcggcggcgacagggacctcagtcaccatcggctgcacatgtacttcttcctgttcgcgctgctcttcaacctgtacatcttgcggacgtacaattggatagcggatccagactttgccagaggccagttccggagacgcgcacgctacggtcaacggcattgggctctgggttggataacgctcgtcacgatagcgacgacgacgctgaccacttacgcgcaggtgacgagggctgcggcgagaacgacgcggcatgccaccgttgtcacggttatcagcattgttctcttcttgctgttctggtgcagtttgcgctacgactggcagcgggactttcaccagttctgtgcgtggagctggcgcttcctgaacaattggttcggcagcgacagtttcttcaaccaccggtgcgactaccgcttcttcggctacgctttgctcgtaacgcactttctgattgagctgacgctgtttacgacgcggctgaaccggacgtacacgttcttcctgttcggtttcctgaacagattgctcttcaacattcagcgccttcgcttcttgttgcgcctgacgtttatcatcattacggcggcggctacgttcacgacgcggcgcttgctgctcgtcggcggtacgcgctttttccgttacctcagcctgctgacggctctcacgcgtctcggcagtctgctgctgtgcctggcgacgattacgacggttttcttcgcgattatcgctgccttcagtacgttcactacgggtgtcgcggcgctcattacggtcacggcggttgttctgacgaggcttgcgacgatcctgttgacgttccggtttcgcttctgctttcggtgctggttgctcggtcggtttggtttcttcaccaccgctgaacagcgctttcagtgcgccgaagaagcggctcaacagcccaggttgtgcaggagctgctggtgttgccggtgcagctttcggtgctggagctacaacaggcgcggcaggttcagctggcgttggcgcaggcggcacatccggcatggcaaaggttgccagcgcaggttgttccggacgcttacgttcagcgaactcttcttcagacggcagcgccatcgcttcttcatgcagcttcggcagcatgtagcttaaggttggggtttcttcccctttacgcacgcgcagcacgtggtagtgcggggtttccatctgatcgtttggcacaattacacagcgcacaccgtcctgacgagtttcaatggcatttaccgcagaacgtttttcattcagcaggtaagaagcgattggcacaggaacaatggcgtgaacttcctgggtgttctctttcagcgcttcttcttcgatcagacgcagaatagagaggctcaggctttcgttgtcacgcacggtgccagtaccagaacaacgcggacaaacgtgatgactggattcacccagacttgggctcaggcgctgacgggacatttccagcaggccaaagcgagaaatatggctgatttgaatacgcgcacggtcctgacgcaccgcttcacgcagacggttttctaccgcacgctggtggcgtactggcgtcatgtcgatgaagtcgataacaatcaggccgccgaggtcacgcaggcgcagctgacgagcaatctcatcggcagcttcgaggttagtgttaaacgcggtttcttcgatatcgccgccgcgggtcgcgcgtgcggagttgatgtcgatggccgttaacgcttcggtgctgtcgataacaatggaaccaccagacggcagacgaacttcacgctggaaggcggactcgatctgactctcgatctggtagtggctgaacagcgggatctcgccggtgtacagtttgattttgctgctgaaatccgggcgacctaatgcagcgatatgctgacgtgccagttcgagcactttcgggttatcgataaggatttcgccgatgtcctgacgtaagtaatcgcggaatgcgcgaacgattacgttgctctcctgatgaatcaggaacggggccgggcggctttcagcggcttttttgatggcttcccagtgtttcagacggaagcttaaatcccattgcagcgcctcagcagatttgccgacgccagcggtgcgcacgataagccccatgccttccggcagttcaaggcttgccagtgcttcttttaattcggtacggtcgtcgccttcgatacggcgagaaatgccacccgcgcgcgggttgttcggcatcagaaccagatagctacccgccagactgataaaggtggttaatgccgcgcctttgttgccgcgctcttctttatcgatctgaacaatgacttcctgaccttcacgcaacacatctttaatgttgggacgaccatgagcactgtagttagcagggaaatattcgcgggcaatttcttttagtgggaggaaaccgtgacgttcagcgccgtaatcaacaaaagcagcttccagactcggttcaatgcgggtgattttacctttgtagatgtttgcctttttctgctcgtgccctggactttcgatatccaggtcatacagacgctgcccatctacaagggcaacgcgcaactcttcctgctgagttgcgttgattaacattcttttcatcgtaacttactcattattcttacattgacgactaagctgcgggcaaagtaacgcctttccgggtgtgaaccgatggcctcgtgtctagtcgcgtcgccaacctcacggttatcgtcagctcaaagaggcgcagagtgagcgttgcccgttttagttgcggaaaaacagcgcaattaagtaagaaacagactgggtattactctccagaaatatttccatctaccggtaaggactgcaacccgcagcccgctaactgcctgaaagatcaatacgtcttacgccattgctgcgtggatgatcggagcggcaaaatgggttattccgtaaaatttcttgttttaacaaggatggacacggaaacggccagtttattccactgcaagccttgttatagcaagatgacttttaccatttatcacccgcttactcacagttttttcacttcttgctggtgattggtttaataaccatcaataaagtgatcacgcagtgaagtaataaggtgcaaaagtaaatataagcatagaaaaatgagtggcgcgaatcctgttggctaattagaatcgccaaccatgaaaacagagactccatccgtaaaaattgttgctatcaccgctgacgaagcggggcaacgtatcgataactttttgcgtacccaattgaaaggcgtaccaaaaagtatgatttaccgtattttgcgtaaaggcgaagtgcgggtgaacaaaaaacgtattaagcctgaatataaactcgaagcgggtgatgaggtgcgtattccaccggttcgcgttgctgagcgggaagaagaggcggttagcccacatctgcaaaaggtggcggcgctggcggacgtcatcttatatgaagatgatcacatcctggtgctgaataaaccttccggtacggcggtacatggcggcagtggtttaagcttcggcgttattgaaggtttgcgggcgttgcgcccggaagcgcggttccttgaactggttcatcgtcttgaccgggacaccagtggtgttttgctggtagcgaaaaaacgcagcgcgttgcgttctctgcatgagcaattacgtgaaaaagggatgcaaaaagattacctggcgctggtgcgcggtcagtggcagagccatgtgaagagcgttcaagcaccgttactgaaaaatattctgcaaagcggcgaacgtatcgtgcgtgtgagtcaggaaggcaaaccgagcgaaacacgctttaaagtggaagaacgctatgcatttgccaccctggtgcgttgtagcccggtaacagggcgtactcaccagatccgtgtgcatacacaatatgcgggtcatccgattgcctttgacgatcgctacggtgaccgtgaatttgacaggcagctcactgaagcaggcacgggattaaatcgcctgttcctgcacgctgcagcgttgaagtttactcatccggggaccggtgaggtgatgcgtatcgaagctccgatggatgaaggtttgaagcgttgtttgcaaaagctgcgtaacgcgcgctaatacaagcatataaacctgataatgggcggttggcctgataaggcgtttacgccgcatcaggccgccagcaccgattgccggatgcgacgtaaccacatccggcgcaaaaaattatcccatcagcgggtttttcccttcccgacgtaacatctgacacagcgcgattagcggtaaaccaaccagcgtgttaggatcacgcccctctaaacgctcaaacagcgtaatgccaaatccttcactcttaaagctacccgcgcagtgcaggggatgctctttacgcacgtaattatcaatctccgcctcgctcaggtgacggaaatggacgtcaaaaggctccacttctgtttgcagatgcccattcgcgctattaaacaacgccagtccagtatagaaggtgacgatattgccgctggctttgcgtaattgcagacgggcattttcttccgttaacggtttaccggtgatttcgccatcaagaacacatacctggtcactaccaataattaaatgatccggataacgactcgccagagattgcgctttttcttgtgccagtcgaagcaccaactgtcgcggactttcgtcgctgcgtggggtttcgtcgacctctggtgctgcacattcaaaagagatttgcagtttttccagaagagcgcgacgccatgggctggtggaggctaaaataagtttaggcatatttttttccatcagatatagcgtattgatgatagccattttaaactatgcgcttcgttttgcaggttgatgtttgttatcagcactgaacgaaaataaagcagtaacccgcaatgtgtgcgaattattggcaaaaggcaaccacaggctgcctttttctttgactctatgacgttacaaagttaatatgcgcgccctatgcaaaaggtaaaattacccctgactctcgatccggttcgtacggctcaaaaacgccttgattaccagggtatctatacccctgatcaggttgagcgcgtcgccgaatccgtagtcagtgtggacagtgatgtggaatgctccatgagcttcgctatcgataaccaacgtctcgcagtgttaaacggcgatgcgaaggtgacggtaacgctcgagtgtcagcgttgcgggaagccgtttactcatcaggtctacacaacgtattgttttagtcctgtgcgtagtgacgaacaggctgaagcactgccggaagcgtatgaaccgattgaggttaacgaattcggtgaaatcgatctgcttgcaatggttgaagatgaaatcatcctcgccttgccggtagttccggtgcatgattctgaacactgtgaagtgtccgaagcggacatggtctttggtgaactgcctgaagaagcgcaaaagccaaacccatttgccgtattagccagcttaaagcgtaagtaattggtgctccccgttggatcggggataaaccgtaattgaggagtaaggtccatggccgtacaacagaataaaccaacccgttccaaacgtggcatgcgtcgttcccatgacgcgctgaccgcagtcaccagcctgtctgtagacaaaacttctggtgaaaaacacctgcgtcaccacatcactgccgacggttactaccgcggccgcaaggtcatcgctaagtaatcacgcatctgcgtgatgaagcttagtgaggattttccccaggcaactggggaaagaccaaaccgggcggcgacgataccttgacacgtctaaccctggcgttagatgtcatgggaggggattttggcccttccgtgacagtgcctgcagcattgcaggcactgaattctaatagccaactcactcttcttttagtcggcaattccgacgccatcacgccattacttgctaaagctgactttgaacaacgtagccgtctgcagattattcctgcgcagagtgttatcgccagtgatgcccggcctagccaagctatccgcgccagtcgtgggagtagtatgcgcgtggccctggagctggtgaaagaaggtcgagcgcaagcctgtgtcagtgccggtaataccggggcgctgatggggctggcaaaattattactcaagcccctggaggggattgagcgtccggcgctggtgacggtattaccacatcagcaaaagggcaaaacggtggtccttgacttaggggccaacgtcgattgtgacagcacaatgctggtgcaatttgccattatgggcagtgttctggctgaagaggtggtggaaattcccaatcctcgcgtggcgttgctcaatattggtgaagaagaagtaaagggtctcgacagtattcgggatgccagtgcggtgcttaaaacaatcccttctatcaattatatcggctatcttgaagccaatgagttgttaactggcaagacagatgtgctggtttgtgacggctttacaggaaatgtcacattaaagacgatggaaggtgttgtcaggatgttcctttctctgctgaaatctcagggtgaagggaaaaaacggagctggtggctactgttattaaagcgttggctacaaaagagcctgacgaggcgattcagtcacctcaaccccgaccagtataacggcgcctgtctgttaggattgcgcggcacggtgataaaaagtcatggtgcagccaatcagcgagcttttgcggtcgcgattgaacaggcagtgcaggcggtgcagcgacaagttcctcagcgaattgccgctcgcctggaatctgtatacccagctggttttgagctgctggacggtggcaaaagcggaactctgcggtaacaggacgctgccagcgaactcgcagtttgcaagtgacggtatataaccgaaaagtgactgagcgtacatgtatacgaagattattggtactggcagctatctgcccgaacaagtgcggacaaacgccgatttggaaaaaatggtggacacctctgacgagtggattgtcactcgtaccggtatccgcgaacgccacattgccgcgccaaacgaaaccgttagtaccatgggctttgaagcggcgacacgcgcaattgagatggcgggcattgagaaagaccagattggcctgatcgttgtggcaacgacttctgctacgcacgctttcccgagcgcagcttgtcagattcaaagcatgttgggcattaaaggttgcccggcatttgacgttgcagcagcctgcgcaggtttcacctatgcattaagcgtagccgatcaatacgtgaaatctggggcggtgaagtatgctctggtcgtcggttccgatgtactggcgcgcacctgcgatccaaccgatcgtgggactattattatttttggcgatggcgcgggcgctgcggtgctggctgcctctgaagagccgggaatcatttccacccatctgcatgccgacggtagttatggtgaattgctgacgctgccaaacgccgaccgcgtgaatccagagaatagtattcatctgacgatggcgggcaacgaagtcttcaaggttgcggtaacggaactggcgcacatcgttgatgagacgctggcggcgaataatcttgaccgttctcaactggactggctggttccgcatcaggctaacctgcgtattatcagtgcaacggcgaaaaaactcggtatgtctatggataatgtcgtggtgacgctggatcgccacggtaatacctctgcggcctctgtcccgtgcgcgctggatgaagctgtacgcgacgggcgcattaagccggggcagttggttctgcttgaagcctttggcggtggattcacctggggctccgcgctggttcgtttctaagataaggattaaaacatgacgcaatttgcatttgtgttccctggacagggttctcaaaccgttggaatgctggctgatatggcggcgagctatccaattgtcgaagaaacgtttgctgaagcttctgcggcgctgggctacgacctgtgggcgctgacccagcaggggccagctgaagaactgaataaaacctggcaaactcagcctgcgctgttgactgcatctgttgcgctgtatcgcgtatggcagcagcagggcggtaaagcaccggcaatgatggccggtcacagcctgggggaatactccgcgctggtttgcgctggtgtgattgatttcgctgatgcggtgcgtctggttgagatgcgcggcaagttcatgcaagaagccgtaccggaaggcacgggcgctatggcggcaatcatcggtctggatgatgcgtctattgcgaaagcgtgtgaagaagctgcagaaggtcaggtcgtttctccggtaaactttaactctccgggacaggtggttattgccggtcataaagaagcggttgagcgtgctggcgctgcctgtaaagcggcgggcgcaaaacgcgcgctgccgttaccagtgagcgtaccgtctcactgtgcgctgatgaaaccagcagccgacaaactggcagtagaattagcgaaaatcacctttaacgcaccaacagttcctgttgtgaataacgttgatgtgaaatgcgaaaccaatggtgatgccatccgtgacgcactggtacgtcagttgtataacccggttcagtggacgaagtctgttgagtacatggcagcgcaaggcgtagaacatctctatgaagtcggcccgggcaaagtgcttactggcctgacgaaacgcattgtcgacaccctgaccgccagcgcgctgaacgaacctagtgcgatggcagcggcgctcgagctttaaaagaggaaaatcatgaattttgaaggaaaaatcgcactggtaaccggtgcaagccgcggaattggccgcgcaattgctgaaacgctcgcagcccgtggcgcgaaagttattggcactgcgaccagtgaaaatggcgctcaggcgatcagtgattatttaggtgccaacggcaaaggtctgatgttgaatgtgaccgacccggcatctatcgaatctgttctggaaaaaattcgcgcagaatttggtgaagtggatatcctggtcaataatgccggtatcactcgtgataacctgttaatgcgaatgaaagatgaagagtggaacgatattatcgaaaccaaccttagttctgttttccgtctgagtaaagcggtaatgcgcgctatgatgaaaaagcgtcatggtcgtattatcactatcggttctgtggttggtaccatgggaaatggcggtcaggccaactacgctgcggcgaaagcgggcttgatcggcttcagtaaaagtctggcgcgcgaagttgcgagtcgcggtattactgtaaacgttgttgctccgggctttattgaaacggacatgacacgtgcgctgagcgatgaccagcgtgcgggtatcctggcgcaggttcctgcgggtcgcctcggcggcgcacaggaaatcgccaacgcggttgcattcctggcatccgacgaagcagcttacatcacgggtgaaactttgcatgtgaacggcgggatgtacatggtctgaccgcgatttgcacaaaatgctcatgttgcgcgcagtctgcgtggttatgagtaataattagtgcaaaatgatttgcgttattggggggtaaggcctcaaaataacgtaaaatcgtggtaagacctgccgggatttagttgcaaatttttcaacattttatacactacgaaaaccatcgcgaaagcgagttttgataggaaatttaagagtatgagcactatcgaagaacgcgttaagaaaattatcggcgaacagctgggcgttaagcaggaagaagttaccaacaatgcttctttcgttgaagacctgggcgcggattctcttgacaccgttgagctggtaatggctctggaagaagagtttgatactgagattccggacgaagaagctgagaaaatcaccaccgttcaggctgccattgattacatcaacggccaccaggcgtaagtgaacatctccaggcggtcgttcgaccgcctgagttttatctttttgtcccactagaatcattttttccctccctggaggacaaacgtgtctaagcgtcgtgtagttgtgaccggactgggcatgttgtctcctgtcggcaataccgtagagtctacctggaaagctctgcttgccggtcagagtggcatcagcctaatcgaccatttcgatactagcgcctatgcaacgaaatttgctggcttagtaaaggattttaactgtgaggacattatcagccgcaaagaacagcgcaagatggatgccttcattcaatatggaattgtcgctggcgttcaggccatgcaggattctggccttgaaataacggaagagaacgcaacccgcattggtgccgcaattggctccgggattggcggcctcggactgatcgaagaaaaccacacatctctgatgaacggtggtccacgtaagatcagcccattcttcgttccgagtacgattgtgaacatggtggcaggtcatctgactatcatgtatggcctgcgtggcccgagcatctctatcgcgactgcctgtacttccggcgtgcacaacattggccatgctgcgcgtattatcgcgtatggcgatgctgacgtgatggttgcaggtggcgcagagaaagccagtacgccgctgggcgttggtggttttggcgcggcacgtgcattatctacccgcaatgataacccgcaagcggcgagccgcccgtgggataaagagcgtgatggtttcgtactgggcgatggtgccggtatgctggtacttgaagagtacgaacacgcgaaaaaacgcggtgcgaaaatttacgctgaactcgtcggctttggtatgagcagcgatgcttatcatatgacgagtccgccagaaaatggcgcaggcgcagctctggcgatggcaaatgctctgcgtgatgcaggcattgaagcgagtcagattggctacgttaacgcgcacggtacttctacgccggctggcgataaagctgaagcgcaggcggtgaaaaccatcttcggtgaagctgcaagccgtgtgttggtaagctccacgaaatctatgaccggtcacctgttaggtgcggcgggtgcagtagaatctatctactccatcctggcgctgcgcgatcaggctgttccgccaaccatcaacctggataacccggatgaaggttgcgatctggatttcgtaccgcacgaagcgcgtcaggttagcggaatggaatacactctgtgtaactccttcggcttcggtggcactaatggttctttgatctttaaaaagatctaagttgtcattttccacccttataaaaggtccgcttgcgggccttttttcttagcttttattccgacttgttccgtagtgaacatgctgccacactaacaattctctgataaggagccggtatgttcttaattaacggtcataagcaggaaagcctggcagtaagcgatcgggcaacgcagtttggtgatggttgttttaccaccgccagagttatcgacggtaaagtcagtttgttaagcgcgcatatccagcgactacaggatgcttgtcagcggttgatgatttcctgtgacttctggcctcagcttgaacaagagatgaaaacgctggcagcagaacagcaaaatggtgtgctgaaagtcgtgatcagtcgcggtagtggcgggcgagggtacagcacattgaacagcggaccggcaacgcggattctctccgttacggcttatcctgcacattacgaccgtttgcgtaacgaggggattacgttggcgctaagcccggtgcggctggggcgcaatcctcatcttgcaggtattaaacatctcaatcgtcttgagcaagtattgattcgctctcatcttgagcagacaaacgctgatgaggcgctggtccttgacagcgaagggtgggttacggaatgctgtgcggctaatttgttctggcggaagggcaacgtagtttatacgccgcgactggatcaggcaggtgttaacggcattatgcgacaattctgtatccgtttgctggcacaatcctcttatcagcttgtcgaagtgcaagcctctctggaagagagcttgcaggcagatgagatggttatttgtaatgcgttaatgccagtgatgcccgtatgtgcctgtggcgatgtctcctttagcagtgcaacgttatatgaatatttagccccactttgtgagcgcccgaattaatcatgaaaaaagtgttattgataatcttgttattgctggtggtactgggtatcgccgctggtgtgggcgtctggaaggttcgccatcttgccgacagcaaattgcttatcaaagaagagacgatatttaccctgaagccagggaccggacgtctggcgctcggtgaacagctttatgccgataagatcatcaatcgtccacgggtttttcaatggctgctgcgtatcgaaccggatctttctcactttaaagccgggacttaccgctttacaccgcagatgaccgtgcgcgagatgctgaaattgctggaaagcggtaaagaagcacagttccctctgcgactggtagaagggatgcgtctgagcgattacctcaagcaattgcgtgaggccccgtatatcaagcatacgctgagcgatgataagtacgccaccgtagcgcaggcacttgaactggaaaacccggagtggattgaaggttggttctggccagacacctggatgtataccgccaataccaccgatgtcgcgttactcaagcgagcgcacaagaaaatggtgaaagcggtcgatagcgcctgggaagggcgtgcggacggtctgccttataaagataaaaaccagttggtgacgatggcaagtattatcgaaaaagaaaccgccgttgccagtgaacgcgataaggttgccagtgtatttatcaaccgtttacgcattggtatgcgcctgcagaccgacccgaccgtgatttacgggatgggagagcgttataatggcaaactttctcgtgcagacctggaaacgccgacagcgtataacacctataccattaccggtctgccgccaggtgcgatagcgacgccgggggcggatagcctgaaggctgctgcgcatccggcaaaaacgccgtatctctattttgtggccgatggtaaaggtggtcacacgtttaataccaatcttgccagtcataacaagtctgtgcaggattatctgaaagtgcttaaggaaaaaaatgcgcagtaagtatatcgtcattgaggggctggaaggcgcaggcaaaactaccgcgcgtaatgtggtggttgagacgctcgagcaactgggtatccgcgacatggttttcactcgggaacctggcggtacgcaacttgccgaaaagttaagaagcctggtgctggatatcaaaagcgtaggcgatgaagtcattaccgataaagccgaagttctgatgttttatgccgcgcgcgttcaactggtagaaacggtcatcaaaccagctctggctaacggcacctgggtgattggcgatcgccacgatctctccactcaggcgtatcagggcggcggacgtggtattgaccaacatatgctggcaacactgcgtgatgctgttctcggggattttcgccccgacttaacgctctatctcgatgttaccccggaagttggcttaaaacgcgcgcgtgcgcgcggcgagctggatcgtattgagcaagaatctttcgatttctttaatcgcacccgcgcccgctatctggaactggcagcacaagataaaagcattcataccattgatgccacccagccgctggaggccgtgatggatgcaatccgcactaccgtgacccactgggtgaaggagttggacgcatgagatggtatccatggttacgacctgatttcgaaaaactggtagccagctatcaggccggaagaggtcaccatgcgctactcattcaggcgttaccgggcatgggcgatgatgctttaatctacgccctgagccgttatttactctgccaacaaccgcagggccacaaaagttgcggtcactgtcgtggatgtcagttgatgcaggctggcacgcatcccgattactacaccctggctcccgaaaaaggaaaaaatacgctgggcgttgatgcggtacgtgaggtcaccgaaaagctgaatgagcacgcacgcttaggtggtgcgaaagtcgtttgggtaaccgatgctgccttactaaccgacgccgcggctaacgcattgctgaaaacgcttgaagagccaccagcagaaacttggtttttcctggctacccgcgagcctgaacgtttactggcaacattacgtagtcgttgtcggttacattaccttgcgccgccgccggaacagtacgccgtgacctggcttagtcgcgaagtgacaatgagtcaggatgcattacttgccgcattgcgcttaagcgccggtagccctggcgcggcactggcgttgtttcagggagataactggcaggctcgtgaaacattgtgtcaggcgttggcatatagcgtgccaagcggcgactggtatagcctgctagcggcccttaatcatgaacaagctccggcgcgtttacactggctggcaacgttgctgatggatgcgctaaaacgccatcatggtgctgcgcaggtgaccaatgttgatgtgccgggcctggtcgccgaactggcaaaccatctttctcccagccgcctgcaggctatactgggggatgtttgccacattcgtgaacagttaatgtctgttacaggcatcaaccgcgagcttctcatcaccgatcttttactgcgtattgagcattacctgcaaccgggcgttgtgctaccggttcctcatctttaagagagacatcatgtttttagtcgacagtcactgccatctcgatggtctggattatgaatctttgcataaggacgtggatgacgttctggcgaaagccgccgcacgcgatgtgaaattttgtctggcagtcgccacaacattaccgggttatttacatatgcgggatctggtaggcgaacgtgacaacgtcgtattttcttgtggcgtgcatccactcaaccagaatgatccctacgatgtagaagatttacgccgtctggcggcagaagagggtgttgtagcgctgggtgaaaccgggctggattattattacacgccggaaactaaagtacgtcagcaagagtccttcatccatcatatccagattggtcgtgaactgaacaagccggttatcgtccatacccgtgacgcccgtgccgatacgctggcaattctgcgcgaagaaaaagtgacggattgcggtggcgtactacactgttttacagaggacagagaaacggcgggtaaattactggatctcggattttacatctccttttccggcattgtgaccttccgtaatgcggagcaactgcgcgatgctgcgcgttatgtccccctggatcggttactggtggaaactgacagtccttaccttgcgccggtaccgcatcgaggaaaagagaatcaacctgcgatggttcgtgacgttgcagaatacatggctgtgttgaaaggtgttgccgttgaagaactggcgcaggtaaccaccgataacttcgcccgtctgtttcacatcgacgcttcccgccttcaatccatccgttgaatgagtttttttaaagctcgtaattaatggctaaaacgagtaaagttcaccgccgaaaattgggcggtgaataaccacgtttgaaatattgtgacatatgttttgtcaaaatgtgcaacttctccaatgatctgaagttgaaacgtgatagccgtcaaacaaattggcactgaattattttactctgtgtaataaataaagggcgcttagatgccctgtacacggcgaggctctccccccttgccacgcgtgagaacgtaaaaaaagcacccatactcaggagcactctcaattatgtttaagaatgcatttgctaacctgcaaaaggtcggtaaaagcctgatgctgccggtatccgtactgcctatcgcaggtattctgctgggcgtcggttccgcgaatttcagctggctgcccgccgttgtaagccatgttatggcagaagcaggcggttccgtctttgcaaacatgccactgatttttgcgatcggtgtcgccctcggctttaccaataacgatggcgtatccgcgctggccgcagttgttgcctatggcatcatggttaaaaccatggccgtggttgcgccactggtactgcatttacctgctgaagaaatcgcctctaaacacctggcggatactggcgtactcggagggattatctccggtgcgatcgcagcgtacatgtttaaccgtttctaccgtattaagctgcctgagtatcttggcttctttgccggtaaacgctttgtgccgatcatttctggcctggctgccatctttactggcgttgtgctgtccttcatttggccgccgattggttctgcaatccagaccttctctcagtgggctgcttaccagaacccggtagttgcgtttggcatttacggtttcatcgaacgttgcctggtaccgtttggtctgcaccacatctggaacgtacctttccagatgcagattggtgaatacaccaacgcagcaggtcaggttttccacggcgacattccgcgttatatggcgggtgacccgactgcgggtaaactgtctggtggcttcctgttcaaaatgtacggtctgccagctgccgcaattgctatctggcactctgctaaaccagaaaaccgcgcgaaagtgggcggtattatgatctccgcggcgctgaccagcttcctgaccggtatcaccgagccgatcgagttctccttcatgttcgttgcgccgatcctgtacatcatccacgcgattctggcaggcctggcattcccaatctgtattcttctggggatgcgtgacggtacgagcttcagccacggtctgatcgacttcatcgttctgtctggtaacagcagcaaactgtggctgttcccgatcgtcggtatcggttatgcgattgtttactacaccatcttccgcgtgctgattaaagcactggatctgaaaacgccgggtcgtgaagacgcgactgaagatgcaaaagcgacaggtaccagcgaaatggcaccggctctggttgctgcatttggtggtaaagaaaacattactaacctcgacgcatgtattacccgtctgcgcgtcagcgttgctgatgtgtctaaagtggatcaggccggcctgaagaaactgggcgcagcgggcgtagtggttgctggttctggtgttcaggcgattttcggtactaaatccgataacctgaaaaccgagatggatgagtacatccgtaaccactaatccgtaagacgttggggagactaaggcagccagatggctgccttttttacaggtgttattcagaattgatacgtgccggtaatgctgaaattacgcggtgtgccgtagacgatagaaccttccacgttggtatcgtaggttttgtcgaacaggttattgacgttcccctgtaagctgaagtttttcgtcacctggtagcgggtgaagagatccaccagcgcgtagctaccttgctcggcgcggaaggtgccatacggcgtcacggtgtcggtatacacgcgattttgccagttaacaccaccgccgaccgtcaactctggcatgacaggcaaccgatagctggtgaacattttaaccgtggtgcgtggcagattaggattaacggcgtttccttcgttatcctctgcaatatagcgcgttgcgccaaatgtcagctgccagttgtcggtaattgcgccgttgagttcaaattccacccctttactgactgtcccatccaccgctttataggcggtttcgccgttgctgccggggataggtgtaccggtggactgagcgacattatcctgctcaatacggaagatggctaacgtggtggtcagacggctattcatccagtcgcttttcagacccagctcgtagttgttaccggtgattggagccagatatttgccactactgtcacgatcattttgcggctggaaaatagaggtatagctggcgtaggtgctccagttgtcattgatgtcaaacaccagaccagcgtaaggcgtggtgtggtttttctccatgctgtaagtcagcgtatcaacccgccagttggtataacgtgcgccgaggatcagatgcagcggatcggcaagggtgacacgagtggcagcatataagcttttcatatgtgtggtatcgtcctgcgccaggctctgtggactccagtcggtttgtgggaaattgccattaaagttgtagaaactgccaatttcatccgggaagatgttggcccaactactgaagtaacgattgttttgtttgctgtaactgccaccaaacattagattgtgctgacgaccaaacaattcataactaccgtcagcgaacaaatccagcgcatcaactttacgtttgccactgttccaaccggtgccgccgacataatcaaagccaggtccataattactgtatggcccaaccagcataccatccgctttgtttacataggcatcgacatacatcattttgctgtcaaattcgacttcagagtgggtggcattcagtgtcgcttgccaggtatcagcaaactgctgcttcagggtcataaagaccttgttgatctctttatcgttgtacgcccagtcaggtgcggtactgcgtgcgcgatcgtaactgttgctgctgccatcagtattccagcgcggtaaaccgccccaggtagggctattaacatcaatgcgctgatattcgtaaccggcactaagcgtcgtaagatcgcctaaatcagcatcgacaatgccgctgaagaaggtcttttcactgttgtagcggtccagccaactgtcgttattctggtagccgccgacaattcgcgcgcggattttaccgtcttcggtgagtgggctttgtaaatccgccacataccgttctttgttccagctaccgtattccgcgctgacatcgcctttaaattcacgactggtcgcgtgttttcgaaccatattaattgccgcagatggattacccgtcccggtcatgagtcctgtcgcgccacgcactacttctacgcgttcaaagagtgccatatcagaaagtgcgtcgcccagattccagcggctttcaaaataggtggggataccatcaaccatatagttatcgatctggaatccgcgggaataataaagagcacgatcggaatccgcctgacttttgctgatccccagcgtgttttccatcacttcgcccagcgtttgtaactgctgatcttccatccgctgctggctaacaatagtgacgctctgaggaatatcacgttgagtcatctgcattttggtacccgcagaggtagacgttacgctgtaatcattttcgccatcatctggagctgtggcactaccctcaacaatcaccgtttcttcagtggctggtgcagcaaaagcggcagaaggtaatagtgccagtgctatgcaaccggcaagtagactcggtttggtgatggcttgatattgattatccctgttaaattgtgtactaagcatttgaaatctcttggtttatgttgtcgtcaggctcatgccggaggagggtgatgagcgattatatttagtgtgcgaataattttgtttgtaaatgcaaatgagaaatatacgcattcatatttgtcatgtaaaccaaacagagaatgtcttttcagcgcattcgcaggcagaaatgggaataatggcgatatatacggcagcaaaacgattttttgcttaagaaatcgtgagttaaggttgaaagagcaggtttaactcgaccatactctatactcgcagtgtggcgcggcgtagcatggcgcaacgcatggctatttgaaaaaggaaaatgtcgtggcagaagaaactatattcagcaaaattattcgtcgtgagatcccctccgatatcgtctaccaggatgatctggtaacggcgtttcgcgatattagcccgcaagcgccaacgcatattctgatcattccgaatatcctcattccgactgtgaacgacgtcagtgctgagcatgagcaggcgctgggacgcatgatcaccgtagcggcaaaaattgctgagcaagaaggtattgccgaagatggctatcgtctgatcatgaataccaaccgccatggcggacaagaggtttaccacatccatatgcacttgttgggtggccgtccgctgggaccaatgctggcgcataaaggtctgtaacgatgagaaaaggatgctttgggctggtgtctctggtgttgttactgctggtgggctgtcgtagtcatccggaaattccggtgaatgatgagcaaagcctggtgatggagagttctttattggctgcgggcatcagtgcagaaaagcccttccttagcacgtctgatattcaacctagtgcatccagtacgctttataacgaaaggcaagaacccgttaccgttcattatcgtttttactggtatgacgccagagggctggagatgcatcctctggaaaggccacgcagcgttaccattcccgcacatagcgcggtaacgctgtacggcagcgccaattttctgggggcgcacaaagtcagactttatctatatttgtaaggggtgaatcttgatgacaaaaatgagtcgctacgccttgattaccgcgctggcgatgtttctcgccgggtgtgtggggcaacgtgaacctgcaccggtagaagaagtgaaaccagcgccggaacaaccagccgagccacaacagcctgtccccacagtgcccagcgtgccgacgatcccgcagcagccaggcccaattgagcacgaagatcaaactgcaccgcctgcgccgcatattcgccattatgactggaatggcgcaatgcagccgatggtcagtaagatgcttggggctgacggggtgactgcgggtagcgtcctgctggttgatagcgttaacaaccgtactaacggtagcctgaatgccgcagaagcgaccgaaacgctgcgaaatgcgctggctaataacgggaaatttaccctggtttccgcccagcaactgagcatggcgaagcaacagttaggtttgagcccgcaggacagtttaggcacccgtagtaaagccataggcattgcccgcaatgtcggcgctcattacgtgctgtactccagcgcctctggcaacgttaacgctccgaccctacaaatgcagctgatgctggtgcagacgggcgaaattatctggagtggtaaaggtgccgttagccagcaataagtaaaattatctggtcaggtaaaggtgccgtttcgcagcaataatcccatcacgcgcgacgaattgctgagccgctttttcccgcagtatcatcccgtcacgacgtttaatagtgggcttagtggcgggagttttctcattgaacatcagggccagcgttttgttgtgcgtcagccgcacgatcctgatgcgccgcagtccgcgttcttgcgccagtatcgggctttaagtcaactacccgcatgcattgcaccgaagccgcatttatatctccgtgactggatggtagtcgactatctgcccggcgcggtaaaaacgtatttgccggataccaacgaactggcaggcttgctgtattatctacatcaacaaccacgttttggctggcgaataacgctgttgccgttactggaactgtactggcagcaaagcgatccggcgcggcggacagtgggttggctgcgaatgttaaaacgtctgcgcaaagcgcgggaaccacggcctttacgcttaagtccattgcatatggatgtccacgccggaaatttagtgcatagcgcgagtgggttaaaactcatcgactgggagtatgccggagatggtgatatcgcgctggaactggcggcggtgtgggtggaaaatactgaacagcaccggcaattggtcaatgactatgccactcgcgcgaagatttatccggcgcaattatggcgtcaggtcaggcgatggtttccctggctgctgatgctcaaagcagggtggtttgagtaccgctggcgacaaaccggcgatcaacaatttatcaggctggccgatgacacctggcggcagctattaataaaacaataaggagagcagtgtgggtccagtaatgttggatgtcgaaggttacgaactggacgcggaagagcgtgaaatactggcgcatccgctggtgggagggctgattctctttacgcgtaactatcatgatcctgcccagttacgtgaactggtgcgccagatccgcgcagctagccgcaatcgtctggtggtggcggttgatcaggaaggtggacgcgtgcagcgttttcgtgaaggttttacccgcttgccagcggcgcaaagtttcgctgcgctgagtggaatggaagagggtggcaaactggcgcaggaggcaggttggttgatggccagcgaaatgatcgctatggatattgatatcagctttgcgcctgtgctggatgtcgggcatatcagcgcggcgattggcgagcgttcttatcatgccgatccacaaaaagccctggcaattgccagccggtttattgatggtatgcatgaagccggaatgaaaacgaccgggaaacacttcccaggacacggtgcagtaacggcagacagtcacaaagaaacaccgtgcgatccacgtccacaagcggagattcgcgctaaagatatgagcgtcttcagttccttaatccgcgaaaataaactcgacgccattatgcctgcgcatgtgatctacagtgatgttgatccgcgtccggcgagcggttctccctactggctgaaaaccgttttgcgtcaggaactgggttttgacggcgtgattttctctgacgatttaagcatggaaggtgccgcgattatgggcagttatgccgaacgcgggcaggctagtctggatgcgggttgcgatatgatcctggtctgcaataatcgtaaaggggccgtcagcgtgttagataatctgagtccgatcaaggcagaacgtgttacacgtttgtatcataaaggtagttttagccgacaggaactgatggacagcgctcgctggaaagcgatcagcacccgtctgaatcagttacatgaacgctggcaggaagagaaagcaggtcactaaccctggcttatgtgaggaagcgatgattatctatttacacggttttgactctaacagtccgggtaaccacgagaaagtcttacaattgcagtttattgacccggatgtacgcttgataagctacagtacgcggcatccgaaacatgatatgcagcatctgcttaaagaagtggacaaaatgttgcaactgaacgttgacgagcgtccgctaatttgcggcgttggcttgggcggatactgggcggaacggattggttttctttgcgacatccgccaggtgatcttcaaccctaatttgttcccttatgagaacatggaaggcaagattgatcgcccggaagagtatgccgatattgccactaagtgtgtgaccaacttccgtgagaagaatcgcgatcgttgcctggtgattttgagccgtaatgatgaagcgcttaacagccagcggacatctgaagagttgcatcattattacgagattgtctgggacgaagagcagacgcacaaattcaagaatatctccccgcatttacagcgcattaaagcgttcaaaaccctcgggtaaatgccctcgtcgcatcaggtaaccttgccggtacctgatgcgctccgaattctgtgggtcggataaggcgtccacgccgcatccgacagtcgagcatcaatgcctgatgcgcttcttatcaggcctaccgaacgccctgcatacacccctcactctatatcactctcacaaattcgctcaaataataaacaataaactctgttttttgatctcacccggtaaagtcgcctatcttttcagcaacaaaacttgattaacatcaattttggtatgaccaatgcaccattcatgttattctcaatagcgaagaacattttcattgctgtaacctgttgttaattaagagctatgttaataaccattaattaacaattggttaataaatttaagggggtcacgttgactacgccattgaaaaagattgtgattgtcggcggcggtgctggtgggctggaaatggcaacacagctggggcataagctgggacgcaagaaaaaagccaaaattacgctggtcgatcgtaaccacagccacctgtggaaaccgctgctgcacgaagtggcgactggcagccttgatgaaggcgtcgatgcgttgagctatctggcccatgcgcgcaatcatggtttccagttccagctgggttccgtcattgatattgatcgtgaagcgaaaacaatcactattgcagaactgcgcgacgagaaaggtgaactgctggttccggaacgtaaaatcgcctatgacaccctggtaatggcgctgggtagcacctctaacgatttcaatacgccaggtgtcaaagagaactgcattttcctcgataacccgcaccaggcgcgtcgcttccaccaggagatgctgaatttgttcctgaaatactccgccaacctgggcgcgaatggcaaagtgaacattgcgattgtcggcggcggcgcgacgggtgtagaactctccgctgaattgcacaacgcggtcaagcaactgcacagctacggttacaaaggcctgaccaacgaagccctgaacgtaacgctggtagaagcgggagaacgtattttgcctgcgttaccgccacgtatctctgctgcggcccacaacgagctaacgaaacttggcgttcgcgtgctgacgcaaaccatggtcaccagtgctgatgaaggcggcctgcacactaaagatggcgaatatattgaggctgatctgatggtatgggcagccgggatcaaagcgccagacttcctgaaagatatcggtggtcttgaaactaaccgtatcaaccagctggtggtggaaccgacgctgcaaaccacccgcgatccagacatttacgctattggcgactgcgcgagttgcccgcgtccggaagggggctttgttccgccgcgtgctcaggctgcacaccagatggcgacttgcgcaatgaacaacattctggcgcagatgaacggtaagccgctgaaaaattatcagtataaagatcatggtagcctggtaagcctgagcaacttctccaccgtcggtagcctgatgggtaacctgacgcgcggcagtatgatgattgaaggacgaattgcgcgctttgtatatatcagcctataccgaatgcatcagattgcgctgcatggttactttaaaaccggattaatgatgctggtggggagtattaaccgcgttatccgtccgcgtttgaagttgcattaatcgacgtacactggcggatgtggcataaacgcctcatccgcccttgaggaacagcgcgatcggcagccgcgttgtatcaggcatcctttcagactcctccgaatccttaagtatttccagccattcccgcgcttttcatcttctgtctgatagctgcttttctccttcgcttgcatgattggcataactgcaaagaaggaggtgttcccgtgaataaaagtatgttggcgggtatcgggattggtgtcgcagctgcgctgggcgtagcggcagtggccagtctgaacgtgtttgaacggggcccgcaatacgctcaggttgtttctgcaaccccaatcaaggaaacggttaaaacaccgcgtcaggagtgtcgcaacgtcacagtgacccatcgtcgaccggtgcaggatgaaaatcgcattaccgggagcgtgctcggcgctgttgctggcggcgtgatagggcatcagtttggtggtggtcgcggtaaagatgtcgccactgttgtgggggcgctgggtggtggatatgccggtaaccagatccagggctctctccaggaaagcgatacttacacgactacgcaacagcgttgtaaaacggtgtatgacaagagtgaaaaaatgctcggttatgatgtgacctataagattggcgatcagcagggcaaaatccgcatggaccgcgatccgggtacgcagatcccgctagatagcaacgggcaactgattttgaataacaaagtataacaaggctgtactctgcaatttggcccctcattcgctcaggctgaggggctttttttgcgacttatttcaccagttcgggccataaacgcaaagtcgttccggcaatctgcatcagtttttccaggcttgcaccttcgcgtgcgctgatgctcatcccctgaataatacaattaaggaattctgccagatgtgtcacgtcacagtggggcgggatttccccgcgcgcttgtcgttgacataaaaactgctgcaaagtgcgctcttgcatcgcatggcgacttttcaacgtattggcgatatctccactatctggggagagggtggtgcagttgttgatcatgaagcagcctgccggggtgtctttgctggtaaagcagttggcgatggcagcaaaatagtcagccagcgcagactccacgcttttctcttcacaaaacagctgtgcttcatgcttagcggcaaaacgatcgatatagcggtcgagaacggcacgaaataacccctctttgttggtaaattccgcgtatagcgtgggcgctttggctccggtcgcttcgacgaggtccgcaagagaagtcgcttcataaccgtgttgccagaacaatttcatggccttatcaagcgcggcatccctgtcgaacacttttgggcggccacggcttttttttacacattgtgtactgtcagttgccatgatgccgttgtacctggtgactgtgaatgaaaggttattataaaaataatcacctccgttcaccagtccagatcccataaaaataattgctttctatttaactgaaatttaaagatttttaaattaattaatgattgttataaaaaatatcttgtatgtgatccagatcacatctatcatttagttatcgatcgttaagtaattgcttgcgacgtcattcatctgcataaggccactattatgaaaaacgtaaaaaccctcatcgctgcggcgattttaagctccatgagttttgccagctttgcggctgtcgaagttcagagtacgccagaaggccaacaaaaagtcggtacaatcagtgctaacgcggggacaaatctgggaagcctggaagagcagctggcgcaaaaagcggatgagatgggcgcaaaatctttccgtattacttctgtaaccggtccgaataccctccatggaacagcagtaatttataaataagcattaaccctcattaatgcctgctactgctgattttttccccgcgacatgccgtgtcgcggggatttttttatccgggctttacagcgtttgtgggctcacttgatgacggcggacatccaccggcatcccggaacggacatccatcacatgttgcatcacttcagcgtcagtttgtgctgcatctttaaaactttgcattgcgctattcagcgtaattggcagcagctgcggatcgtcatcaatcttctcactcagcggctgatgtacttcaaccagacgcgcaccgtttggttcggcagagacttttatcggagtgttgatgatattcactttggtgcctggggtgacctggctaaagagtgttttgatatcgtcatcccgcagacgaatacagccagaacttacccgcatgccaatgccgaaatcggcgttcgtaccatgaagcaaataaacgccgccataggccgccagacgaatcgcatgatggcccattgggttatccagtccagccggcactaccgcaggcaactcaattccctgtgctttataacgggcgcggatgtttgccgttggcgtccaggttgggtttgcacgtttgtcactaacggtggtcaccattgtcggtgtcagcgtgtcaccacctaactgaccaatacctattggatacacggttacgctatttttacccggcgggtagtaatagagacgcagctccgcaatgttgatcacaatgccttcgcgcggcgcatctggaagtagggtttgcaacgggatcgttaacacgctgcccgcgcgcggtacgtaaggatcaacgccggggttagcctgtaacagagcgagaaagccgacgttgtattttttggcgatggcttccagagaaccaccgtcattttccaccacatgaaatttgttttcgccaaccagacgactgcccgctggcggcagcggccaggtgttggcttttgccggtagcgccagcgccacggcagcggcgaacgtaaaaaacgttagccagcgagaaaaacgcgttttgatcatcaccaaaaatccataataaatataaggttattgtaataaacagataagcctgaattatggatggtgacagtgtcggatagtgcagggaagtgcaaagaatttgtaaatgttgcagatgggggcgcagaaacgcccccgatttaccattaagcgatcgcgttctcttccagttcacgcataaactggcgtacccattcgatacgcgttttccgctcactcaaatcctgaataaatttcaggcgcgtcggaccatcaaggcggtaatgctgcggctgtttttgcagcaaaccaatcaaccaggccggattaacgtgattcttctcggcaaattcgatcaccccgcctttctcattaccttccagcttcctgatccccagtttctgcgcttgctggcgcagacgggcaatatccagcagggtacgcgccggatctggcagcaggccgaagcgatcgataagctcgactttgatctcttccagttcgttttccgttttggcgctggcaatacgtttgtagaagctcagacgcgtgttcacgtcagggatgaaatcatctggcaataggctcggcatccgcagctcgacttctgtttgctggctggtgagatcttccaggctcggctcgcgtccggctttcagtgcatcgacggcgttttccagcaactccatatacaggctgaaaccgatggtttccatactgccgctttgttcttcgccaagcagttcacccgcgccgcgaatctccagatcgtgcgttgccagcgcaaaacctgccccgagatcttccaggctggcaattgcttcaagacgtttttgtgcatcggtagtcatcgcttttggatgcggtgtcagcaaccatgcatatgcctgatgatggctacgtccgacgcgaccgcgtaactggtgcagctgcgccagaccgaagtgatccgcgcgttcaatgataatagtgttggctgtcgggatgtcgatcccggtttcgataatggttgtacaaaccagcacgttgaaacgttgatgatggaaatcattcatcacccgttccagttcgcgctcgcgcatctgcccgtgaccgatggcgatccgcgcttctggcaccagttctgccagccgttcggcggctttctgaatgttttccacatcattgtagagataataaacctgtcctccgcgcaaaatttcacgcaggatcgcctcccggaccaccatgctgtcatactcacggacaaaggttttaactgccagacgacgggcgggcggcgtggcgataatgctcaggtcacgcattccgctcattgccatattcagcgtacgtgggatcggcgttgcagtaagcgtcagaatatccacgttcgcgcgcatcgctttaatgcgctctttatgacgcaccccgaagcggtgttcttcatcgacaatcagcaggcctaaatctttaaacttgacgtcactttgcagcagtttgtgcgtaccgatcagaatatcgattttcccttccgccacttccgcaaggatttgcgtctgctctttggcgctgcggaaacgggagatcatttcgatacgtaccggccagttggcgaaacggtcgcggaagttgtcgtaatgctgctgcgcgagaagggtggtaggcaccagcaccgccacctgcttgtggttatctactgccaggaaagctgcgcgcatcgccacttctgttttaccaaagccaacatcgccgcacaccagacgatccattgccagcggctgacacatgtcgctaagtaccgcattaatggcctgcgcctgatccggcgtggtttcaaacgggaagctgtcgcagaacaactgatactgctcacgatcgtgtttaaacgcgaagccctctttggcggcgcgttgcgcgtagatatccagcaattccgccgccacatcacgcactttttccgccgctttctgccgcgcgcgactccacgcatcgccgccaagtttatgcagcggggcgttttcttccgcgccacctgcgtaacggctaatcagatgcagactgctcaccggaacatacagtttggcgtcgttggcataggtgagcatcagatactcgccagtaatgccacccgcttccagcgtggtcattccggcataacgaccgacgccgtgctccagatggaccaccggctgaccaatatgcagttccgcaaggttacggatcagtgtatcggggttgatggtgcggcgagaatcctgacgacgacgggcaacgcgttcaccgagcagatcgctttcgcaaatcagcgccagattacgcaccgtatcgacaaaaccatgttcggcagcgccaatcatcagataacgcccacggtcgctggcttcatcaagacgcataatgcgttgcggagcaattttaattcgtgcgagcagttcacccagcgcttcacggcgaccttcactttctacgctgaacaccaccggaccgtcgaaagtctcgaggaacttacgcagcgcatccagcggcgctttttgttgtgcctgaacggccaggtctggcagtttctggaaacctaaattggcattcgcggcttttgtcggtaaatgttcagtttttagctgcacccggggccagtttttcagctcactgaagagctcgtccacccgcagccagaggctttgtggtggcaacagcgggcgcatcggatcgacgccgcgattctcaaaacgcgccagcgtgtcagcctggaaacgttcggcactggtttccagatcgccagtattcacgagcaaggtattggcagggaaataactgaacagcggcggcagtggttcgctgaagaacaatggctgccagtactcgatcccggcaggtaatgtgcctttactcacttgctggtaaatatgttctggatcgcgcttcacttcgaaggtatcgcgccactggctgcggaacagttcaattgccgctttatcggtcggaaattcgtgcgcgggcagcagattgatcgcttctacttcctccagcgtgcgctggctgtcgacgtcaaacacccgcaggctgtcgatttcatcatcaaagaaatcaagacgataaggcagctcactccccatcgggaagagatccagcaacgcgccgcgcgtggcgtattcgccgtgctccatcacctggtcaacatggcgataaccggcgctgtccagttgggttcgtaatgcatctcgactcaggcgctgaccttttttcatcaccagcgcatgaccgtggagaaaactgtgtgggcaaacgcgctgcataagcgtattcaccggaacaatcagtacgccacgctgcatcgtcggtagctggtaaagggtggaaaggcggctggagataatgtcctgatgagggctaaaactgtcgtagggaagagtttcccagtccgccagattcatcaccatttgatcggtaaactggctgatttcatcatgcaaacgcagagcattttgcatatctggtgcaatgagtaccaccggaccggcgtgacgttcggcaatttccgctaccagcgttgcacaggctgcgccggttaactcgcccagcagacgctgctcacccgctttgacgggcagcgtataacgatattgttcaggcataacggttgtcagattctcgttaggatatgcctcaacatatgggggcatatctctgataagcaatgctgttcattatccgtaatcgacatggtttagcaaattgaatcgccccggctggggcgatggcttagcgggagtaactgacggcagcgggcagactaggcggggagaacaacagatcgctgaatgcacgctgactaagttttcttaccagcaagcccgcaacagtacagatgaacaaactgacaaagggataaaccagcaggagtgtcagttcgacttgcgggctccagcgtgctgcgttcatttgcgcaagcagagttaagctgaatatttcaaccagaatgcgatgggtggtgtagatagcaatggtgttggagccaatcacattcagcaggctggtggagcgcataccgaatcgttgctcgtattgataaaacagcttcatgatcaccacaatgcttaccaggctcaacagcaggctgatagtaaacaaccaggcaccgaccgccagaacggtaagcaaagaagccatcagcagatggcggcgcaacggcacctctttaacacaggtcattattgttgcgccaaaccatgcgccaaggctgtaataaggcaaattgcggatcacactgttcattccccaccacggcgtgggaacgaaattaaccgccacactcagcagtacaaacaaggcgaatagtggcagcgccagacggctaaaaattttacataccacgaaatagacaattaacgcatacagataccacaagctggtgctggcggtgatcatcccgtgcaggaactcaccggtggaatcggcataagcggcattggaggcattgcttaaatcgcgctcaggtgccagccactggttcagcgcacttaacgccagccactgcaccacgccccaaagcgccagcacccagaagatgttccagatccgtttatcgagacaatttccccacggtacgctgtcgatatagcggcgaatcaaatagccggatataaagaaaaaaaccggcatacgaaagggggcaaggtaaagattgaaatagatccagcatttgctcaggacttcgcttaacggatgctgaaaagtggtcagatgcggataaaaggtaatgacgctgtgataaatcaccaccagacaaatacataaccctttgatctggttaatccatagctctttttgtttcatcaggacaacacgctcttttttaatttacatgcggttgatcctgcgggttatgacccgaggtgtaatgggtatctgtctgtattggatgatttttcagattaagatcaggcggcaagattgatgataaaacatggcaatttagccgattgatttacgggggcttttcagattagccctgacgatcacttacagttcagacgtttacccatcttgctttcgcttatatactcgtgtctttgctacagcaaccagacggatttcatgtaccaacctgtcgctctatttattggcctgcgttacatgcgtgggcgtgcagcggatcgcttcggtcgtttcgtctcctggctttctaccatcggcattaccctcggggtgatggcgctggtcacagtattgagtgtgatgaacggctttgagcgcgagctgcaaaacaacatccttggcctgatgccacaggcaattctctcttctgagcatggctctcttaacccgcagcaactcccagaaacggcagtcaaactggacggcgttaatcgcgtcgcacctattactaccggtgatgtggtactgcaaagcgcgcgcagcgtggcggtcggggtgatgctcggtatcgacccggcgcaaaaagatccacttacaccgtatctggtcaatgtgaaacaaactgacctcgagccggggaaatataatgtcatcctcggcgaacaacttgccagtcagctaggcgttaatcgcggtgatcaaatccgcgtgatggtaccatctgccagccagttcacgccgatggggcgtattccaagccagcgcctgttcaatgtgattggcactttcgccgccaacagtgaagtcgatggctatgaaatgctggtgaatattgaggatgccagccgtctgatgcgttatccggcaggcaatattaccggctggcgtttgtggctggatgagccgctgaaagtcgacagtttaagtcagcaaaaactgcctgaaggcagcaaatggcaggactggcgtgatcgtaaaggcgagttgttccaggccgtacgcatggaaaaaaatatgatgggtttactgctgagcctgattgtcgccgttgcggcgtttaacattattaccagtctagggctgatggtaatggagaagcagggcgaagtagcgatcctgcaaacgcaaggcttaactccgcgacaaatcatgatggtctttatggtgcaaggggccagcgccgggattatcggtgcgatcctcggagcggcgcttggcgccctgcttgccagccagttaaataatctgatgccgataatcggcgtcctgcttgatggcgcggcgctgccggtggctatcgaacctttacaggtcattgttattgcgctggtggcgatggctatcgcgctgctgtctacgctttaccctagttggcgcgctgccgccactcaacccgctgaggctttacgttatgaataagatcctgttgcaatgcgacaacctgtgcaaacgctatcaggaaggcagtgtgcaaaccgatgtgctgcacaatgtcagtttcagcgtcggcgaaggtgaaatgatggcgatcgtcggtagctctggttccggtaaaagtaccttgctgcacctgctgggcgggctggatacgccaacctccggcgatgtgatttttaatggtcagccaatgagcaaactgagcagcgcagcgaaagctgaactgcgcaaccagaagctgggctttatttatcagtttcaccacctgctgccggattttaccgccctggaaaacgtggctatgccgctgctgattggcaagaaaaagcccgctgaaatcaacagccgtgcacttgagatgttaaaagcggtggggctggatcatcgtgcgaatcaccgcccatctgaactttctggcggcgaacgccagcgtgtggcgattgcccgtgcgctggtgaataacccgcgcctggtactggcggatgaacctaccggtaacctcgatgcgcgtaacgccgacagcatcttccagttgcttggggaattgaatcgcttgcagggcaccgccttcctggtggttactcacgacctgcaactggcgaaacgtatgagccgccagttagaaatgcgtgatggtcgtctgacggcggaactgagcctgatgggggcggagtaatggcgatgcctttaagcttattaattggcctgcgttttagtcgcggacggcggcgcggcggcatggtgagcctgatctccgttatttctaccattggcattgccctcggcgtggcggtattgatcgtcggcttaagcgcgatgaacggctttgaacgcgaactgaacaaccgtattctggcggtggtgccgcatggtgaaatcgaggcggtggatcagccgtggactaactggcaggaagcactggatcacgtgcaaaaagtgccgggtattgccgctgccgcgccgtatatcaatttcaccgggctggtggaaagtggcgcgaatcttcgcgcaatccaggtgaagggcgttaacccgcaacaggaacagcgtctgagcgcattacccagctttgtccagggcgatgcgtggcgcaattttaaagcgggcgaacagcaaattatcatcggcaaaggcgtggcggatgcgctgaaagtgaagcagggggattgggtgagcattatgatccccaacagcaatcccgagcataaactgatgcagccaaaacgtgtgcgtttgcacgttgccggtattttgcagttgagtggtcaactcgatcacagttttgccatgatcccgctggcggatgcccaacaatatcttgatatgggttccagcgtgagtggtattgcccttaaaatgacggatgttttcaacgccaataagctggtacgcgatgcgggtgaagtgaccaacagctatgtttatattaaaagctggattggtacttacggctatatgtatcgcgatatccaaatgatccgcgccattatgtatctggcgatggtactggtgattggcgtggcctgtttcaacatcgtctccaccttagtgatggcggtgaaagacaagagtggcgatatcgcagtattaagaacgctgggggcgaaagatggtttaattcgcgccatctttgtctggtatggattgctggcagggctgttcggcagcctgtgtggtgtgattatcggcgtagtggttagtctgcaacttaccccgattattgagtggattgaaaagttgatcggtcatcagttcctctccagcgatatctattttattgatttcctgccaagcgaattgcactggctggacgtcttctacgtactggtcacagcattgttgctgagtcttttggcaagttggtatccggcgcggcgcgccagtaatattgaccctgcgcgagtccttagcggccagtaaaggcagtacattaaaacaaggagcggcaatgtattacgggtttgatattggtggaacaaaaattgcgcttggcgtgtttgatagcggtcggcagttgcagtgggaaaagcgggtgccgacaccgcgtgacagctatgacgcatttttagatgcagtgtgtgagctggtagctgaagctgaccaacgttttggctgtaaaggttctgtcggcatcggtattccgggaatgccggaaacagaagatggtacgctgtatgccgccaatgtccccgctgccagcggtaaaccgctgcgtgccgacctgagcgcacgtcttgatcgcgatgtacgccttgataacgatgccaactgttttgcccttagtgaagcctgggatgatgaatttactcaatatccactggtgatggggttgattctcggcaccggtgttggcggcgggctgattttcaacggcaaaccgattaccggtaaaagctacattaccggcgagtttggccatatgcgtctgccggttgatgcgttaaccatgatggggttggatttcccgttacgccgctgcggctgtggtcagcatggctgcattgaaaattatctgtctggtcgcggttttgcgtggctgtatcaacactattatcatcaaccgttgcaggctcccgaaattattgcgctttatgatcaaggcgatgagcaggcaagggcgcacgttgagcgttatctggatttattagcggtttgtctgggaaatatcctgaccatcgttgaccctgacctggtcgtcattggtggtggcttaagcaatttcccggcaatcacaacgcaactggcggacaggctgcctcgtcatctcttacctgtagctcgtgttccgcgcattgaacgcgcgcgccacggtgatgcgggaggaatgcgtggtgcggccttcctacatctaaccgattaaacaacagaggttgctatgctgagccgtcggggtcatcggttaagtcgttttcgtaaaaataaacgccgcctgcgcgagcgtttgcgtcagcgtatttttttcagagataaagtggtgccggaagcaatggaaaaaccaagagtactcgtactgacaggggcaggaatttctgcggaaagtggtattcgtacctttcgcgccgcagatggcctgtgggaagaacatcgggttgaagatgtggcaacgccggaaggtttcgatcgcgatcctgaactggtgcaagcgttttataacgcccgtcgtcgacagctgcagcagccagaaattcagcctaacgccgcgcatcttgcgctggctaaactgcaagacgccctcggcgatcgctttttgctggtgacgcagaatatcgacaacctgcatgaacgcgcaggtaataccaatgtgattcatatgcatggggaactgctgaaagtgcgttgtagtcaaagtggtcaggttctcgactggacaggagacgttaccccagaagataaatgccattgttgccagtttccggcacccttgcgcccgcacgtagtgtggtttggcgaaatgccactcggcatggatgaaatttatatggcgttgagcatggccgatattttcattgccattggcacatccgggcatgtttatccggcggctgggtttgttcacgaagcgaaactgcatggcgcgcacaccgtggaactgaatcttgaaccgagtcaggttggtaatgaatttgccgagaaatattacggcccggcaagccaggtggtgcctgagtttgttgaaaagttgctgaagggattaaaagcgggaagcattgcctgatgcactacgcttatcaggcctgcaaggggacgcaattaattgaatttgcgggttttgtgggccggataaggcgttcgcgccccatccggaataatacacgcgcacttttccggcctcttttatcgtttactcgtcaataacaatgcggcaataaacgtacagacaccaattagccctgcccagagtgggcttattctggtaatcgcaaagctattatcgatatacaaacataaagcctgataacccatattggcaatagtcatcgccactgcaaattttaacgcataaataaaacgagtcgtgtagtaaaagatcctggaaaataagataaacgtcgcagcccaggcgataaaacctaatgtgttggtgctgccggggggagcattttcatgctgttgtcctggatgcggataatacgttagtggcggcgtgctttgttttaatatctgtgcttgtagaacagccaatgcattattgattccctgataccagagatctgcatttaaataagccagcgtgtgattttctatcagaaggccgagatgtttatcgtccagaccactttcaacctggccgttggtgatcataattaaccgtggttcgcgggtagtaaatagtaacagaacacttccttttacatcactcaaactagaactcgcatgcgccagcatcgctttaccattttgtctgagactggcttcattattaatgtcgggtaaaaccacaataaacggtgcaattcccgtttgttggcgaaaaagctcggctttatgcgcgatctcttcagcatctggtacagtaccggtaacgtccgtaaaaagtgtcttcattattggaattaatggcttgctggctgctgtcagaggcaggagtatcagtaaactgagcagtataatgaattttttcatgggcgggacttccgtttcctgcgactttttttagaggagggcatacttattaataaaccgacggcgataaaaataacgcccataatgccgataaacccccatttaaaaaaattaacccacgggttatttatctcagccttttcaggatgcccgggagaataataaacattaactttatcgccttcgctgtcttcataaaaatcgctgccgatactgctattgaaaattagcgtgtaatctggcgtcggtcgaaaggcaacgacgggataccagctaccatctttacccgtgcgatgagaatgactggagtgccagacggtatcaacaatgacgccttcggtatgaatcgcgtctttgctataggtgaactggttataaaagacaacaacagaaatgaggatcagtaccagaccgataccgaggaatatacgaaagaaaactttactgtcctgactcattagccacatccttgctaactaaaaaacgggcggtaataccaccgcccgcttgctgaattaacgtcctgctttcagcttctgataatactcttcataaatgctgctggctgcgccaacgtcattctgccattcgccatttttaatggtttcagcatccgggtagagtgttttatcgttcgccacttctggacttaacagcttacgcgccgcaaggtttggcgttggataaccgatagtttcagcaacctgttttgccacatccgggcgcagcaggaagttgatcaatttcagcgcgccttctttgtttttggcatttgccgggatcgccaggctgtccatccagaaaatgccgccttctttcggccacaccacgtcaattggcgtacccgcctggcgtgcaacgaaagcagaaccgttccagatcatgccgaggttaacttcgccttccatgtacgggttcgccgggttatcggagttaaaggctgccacgtttggcatcagttttttcagctcgttatatgcagcttcaatctctttcggatcggtggtgttaccggagtagcccagcttacgcagcgccatctggaacacttcacgggcatcgtcggtcaacagcaggctgcctttgtactctggcttccacagatcggcccagctggtgacagatttcggatccaccgcatcaccgttaacaccaatcgccgtcgcaccccagatatacggaatggagtagtcgttattcgggtcaaaaggcttgttgagcatgtctggatcgagattgctgaagtttgttaacttgctcttgtcgatcttctggatcatcccttctttacgcattttatcaacgtaataggtactaggaaccaccagatcataggcaccgtctttgtatgttttcagcttggcgtacatggtttcgttgctctcgtaagtgctatagataaccttaataccggtttctttggtgaactgttcaagcagtcctggcggcacgtactcggtccagttgtagaaatacagcgtgttgttgtcatcggcgtgagcggcgctcatgcccagtgccagagcacccgccgcgagcaggtggcgactccattttttcatttaacgtcccctgtgttacctttcgttttatcacgagcaataagctggctggcaataaccatcaccaggctcagcaccagtaatatggttgccagcgcgttaacttccgggcttacgccgactttgaccatgctataaatttttaacggcagaatttcataacttggtccggtgacgaagctagaaactaccacatcgtccatgctcagggtaaagcttaacacccagcccgccgccaccgctggcattgccagtggcagaatgatttttcgcagaatggtaaattcgctggcaccgagatctttcgccgcttccagcattcgcacgtcaaaacctttcaggcggctatacaccgtcaccaccacaaatggcaggcagaaggtgatatggctgaacagcaggctccagaagccaagctgaatacccagcagcataaacagcaccagcaggctaatcgccatcacgatatctggactcatcatcaccacaaacagcattccgctaacgaacggcttaccacgaaagcgataacggtacagcgcaactgccgtcagactaccgataagcgtagcaaacgtcgcgctaaacaccgccattgttagactatgctgcgctgcctgtaacaggctgtcgttgttcatcagcaggctataccatttggtggtaaagccctgccagttgatgccaaagcggctgctgttaaaggagttcacaatcaaaataatgattgggatatacaggtacgcgtagatagcggtcataaaaccgccgcgaagcagtcgaccgatcattcgagttccaccttcttattcagcaaacgagaagcgcgccagtaaaccagcaacatcaggcccattacgatagtcagcgtaatgctggtagctgcaccaaacggccagtcacgaatattaaggaactggaccttgatgacgttaccgatcagcaggtttttcgcaccgcccatcaggtcggatacatagaacaggcccatcgctggcagcatcaccagcagacatccggcaataattcccggcatcgtcagtggaataatgatacggataaaagtctgtaacttgctggcaccgagatcgcgcgccgcctcaagcaacggcttatccagtttttcgatactggagtacagcggcatcaccataaacggcagcagaatgtaaaccagaccgataatcaccgcactgggcgtgaacatgatacggattggtgtgtcgataacgcccagccagagcaaaaactcgttgagatagcctttggtgctgaggaaaattttcagcccgtagatacgaattaaactgttggtccagaacggaacaatcagcagaaacagcagcagcggacgcaccttgtgtggcaacttcgccagaaaccaggcaaacgggtagcccagcaccaggcaggcgagggtggcgatcagcgccatattcaggctgtgcaatagcacttcaaaatagagcggatcgagcagacgcgtgtagttatccagcgtaaagaccattttgacaaaactggcgtcgtcgcgggtcaaaaagctggtgccaatgatcatcaggttgggcagaaagacaaacaacacaagccaaccgacaatagtgacaatcactacattctggaacttacttgtgttcttcatcagccagtacgacctcccagctttctacccaattaatggccattttttggtcgagagagtggtcaaagtcaggatcgtcttcattgaagaattcgctgaccatcaccatcttgccattttccagttcaacaacgctctccagcgtcatgcctttgtagttacgctcgcgaacgtaaccaatcagcccttcagcgtggttgtcgtcgttaatctcttcaacacgtaagtcttccgggcgcagcagaacatgcagtttttgccccggttcaacggcgaagttaacgtagatattacattcgcggccttcaacgttggcgcgtacgcgctgctcgtctagacgttcgatgacagtggcgttaaacatattgatttcgccaatgaagccggcaacaaacaggtttttcggctcttcgtagatttcacgcggcgtgccgtcttgctcaatgcgaccatcgcgcatcaccacaatcctgtcactcatggtgagtgcttcttcctggtcgtgagtcacaaagacgaatgtaatgccaagcttacgctgtaacgctttcagctcgttctgcatttgcttacgcagtttgtaatccagcgcactgaggctctcatccagcaacaacagacgaggcttgttaaccaccgcgcgagcaatggcgacgcgttgctgttgaccaccagagagctgatgcggtttgcgttgagcgaaggtttccaactgcaccatccgcagggcttccatcacgcggggcgtaatttcagcagcgggggttttttgcatgcgcaacccaaaggccacattttcgaacacggtcatgtgggggaaaagtgcgtagctttggaaaacagtgttcacatagcggttttccgccggaacgtgggtgatgtcctcgttatccagcatgatgcgtccggaatcaacagtttccagacctgcaatcaggcgaagaacggttgttttaccgcagccagaagggccaagcagcgtgaggaactcgccattgttgatagtcagatccagctggggaatgacctctttaccatcaaagcatttgcgaattcccgccaattgcaccagcggactaaggctactcggttgtttattcaattttttactctgtcccatgtaaacgcaacggatggcttaccgatgcggggtttgtggttaaccaccttggtgactcttaatgagggcggtaattctacggcaaaccgcttgaatcgccaatctttgttgtgaattactggcttagctttatattcattaaggtaatgctgataaatattcccgcttgcaggggtaaaagtgacctgacgcaatatttgtcttttcttgcttcttaataatgttgtcacaaaaagtgagggtgactacatggataaactacttgagcgatttttgaactacgtgtctctggatacccaaagtaaagcaggggtgagacaggttcccagcacggaaggccaatggaagttattgcatctgctgaaagagcagctcgaagagatggggcttatcaatgtgaccttaagtgagaagggcactttgatggcgacgttaccggctaacgtccctggcgatatcccggcgattggctttatttctcatgtggataccagtccggattgcagcggcaaaaatgtgaatccgcaaattgttgaaaactatcgcggtggcgatattgcgctgggtatcggcgatgaagttttaagtccggttatgttcccggtgctgcatcagctactgggtcagacgctgattaccaccgatggtaaaaccttgttaggtgccgatgacaaagcaggtattgcagaaatcatgaccgcgctggcggtattgcaacagaaaaaaattccgcatggtgatattcgcgtcgcctttaccccggatgaagaagtgggcaaaggggcgaaacattttgatgttgacgccttcgatgcccgctgggcttacactgttgatggtggtggcgtaggcgaactggagtttgaaaacttcaacgccgcgagcgtcaatatcaaaattgtcggtaacaatgttcatccgggcacggcgaaaggagtgatggtaaatgcgctgagcctggcggcacgtattcatgcggaagttccggcggatgaaagcccggaaatgacagaaggctatgaaggtttctatcatctggcgagcatgaaaggcaccgttgaacgggccgatatgcactacatcatccgtgatttcgaccgtaaacagtttgaagcgcgtaaacgtaaaatgatggagatcgccaaaaaagtgggcaaagggttacatcctgattgctacattgaactggtgattgaagacagttactacaatatgcgcgagaaagtggttgagcatccgcatattctcgatatcgcccagcaggcgatgcgcgattgcgatattgaaccggaactgaaaccgatccgcggtggtaccgacggcgcgcagttgagctttatgggattaccgtgcccgaacctgttcactggcggttacaactatcatggtaagcatgagtttgtgactctggaaggtatggaaaaagcggtgcaggtgatcgtccgtattgccgagttaacggcgcaacggaagtaagcgaaaagggatgcggcatgtgatgccgcatccggcttaaatccaaacttacccttcgaagaaccaatacccgctattgaccagcgccgcgagcatcgcgaggaaactcggatcttccagcgcatcgccaaaattctccgcagtcagcgcaatgttgctggcgagtgcatccagtgccggacggtgcggggaatcgatcttctcaccattggcatacacgtcgtcgccaatgcgcaatacgcgcagaccacccaggcgcaccagcacttcaccttgtttcagcgcatcgtagatttcatccggctgataaggcggctctggcggcgcgatatccagttcatgacgactctgggatataaactcgccaaaccattgcttaaagtgttccggctggttgatcaattcgagcatcatctcacgcagtttatccatctcttgcggcagaacatccgcaggatgagcgcgaggtggaacatccggatcgctgtagtagttgccgcccagttcacgttgcagcacataatcggcaaatccactaatcagttcccgcgtatttggcgcgcgaaagcccacggaatagttcatcgcattttccagcgcgtagccttcatgcgggaatcctggcggaatataaagaatatcaccaggctccagctcttcatcgatgatggcttcgaacggatcgacctgtaacagatccggatgtgggcagtgctgtttcatttgcagcttttcgcccactcgccagcgacgacgtccggtaccctgaatgataaacacgtcgtactgatcgagatgcgggccgacgccgccgccgggtacagaaaaagaaatcatcagatcatcaatacgccagtccggtagttcacggaacggtcgcatcagcgcggcggtcggctcatgccagtggttcactgcctgtaccagtaaactccagttggtttcaccgagatgatcgtagctttcgaacgggccgtggctgacctgccatttgccatcctggtgactgaccagtcgactgtcaacttcgctttccatcgccagacccgccaactcgtctggagagatcgggtcaataaaattattaaagccgcgttttaacaccaccgggcgtttctgccagtgacgttcaagaaaatcgggccagttaagagtgagttggtattccatgttaagcatccacaggctggtatctgcaaccgattataacggatgcttaacgtaatgcgtgaagtatgggcatatttattcatctttcggcgcagaatgctggcgaccaaaaatcacctccatccgcgcaccgcccagcatgctctctccggcgacgattttaccctcatattgctcggtgatttcgcgggctaccgccagccctacaccttgcccagggcgtaaagtatcaacccgttgaccacggtcgaaaatgacctctcgcttgcttaatggaataccggggccatcatcctcgaccacaatatagagatgctcgtcggtttgccttgcagaaatttcgacaaactcgaggcaatatttacaggcattatccagcacgttgcccatcacctcgacaaaatcgttctgctcaccgacaaagctgatctctgggctaatatcgagagagatattgacccctttgcgttgatacactttgttcagcgcactggtgagattgtccagcagtggggcgaccggatgcagctcgcggctgagcaatgtcccgccgcgcatactggcacgatgcaggtagtagccaatttgctgactaatgcggctgatttgctccagcattaccggctcagcatcactgacgctcatcttttcactacgcagagaacgcagcgtactttgcagcaccgccagtggcgttttcagactatgggtcaggtcggtgagcgtcgtacggtatttgtcgtaacgttcgcgttcactttttaacaatcggttcaggtttcgtaccagactggtcagttctcgcgttgtggctggattgagcaattcgcggttatgttcttccagttcgcggacttcttttgccagggcttcgatggggcgtaaactccaccaggcggcgacccacagcagcgggatcactaacagcagattggcactgagcacatagataaaccagctccagaccatataggaactttttagctccaccggaatggtatccaccaccacaatggttaattttggcatccggcttgttgccgggtagacgtttactgccacgctgtgggtcatctccgcgtcgtcatcatcttcccgcacttcctgcaactgttgctgtatgctatgatctccactcagcaagaggctggtatcgttaacatccgcttcaatttcatgaaaaccattgcttttcagccagtcaggctggatcatcttcatcagccagggcacgtcacgttgcgcccataaaagctgcccgttctcatcataaattagcgtcatggtggggctttgcttgtcgatattttcgggtaactcgacatgcaacttattgttttcccacttcgcaagggtatagaacagattgctctcgccacgtaacagccgaaacgtagttttatcgaaactgacgctataaccgatcagcgcgaccattccgtaggcaaggctaagcaccagtactaccgctgccgttgccaacagaaaacgtacccgcaggctgagcgggaaaaaaagacgcagtaattttttcatcagcgcaattcgaacagatagccctggccgcgaacggtggtaatcacttcttggggatattgtgcctgaatttttttgcgcagacgtcccatcagtacatcaatggtatggctttcccgcagctccgcatccggatagagttggagcattaagctatctttgctgaccactttgccattattgcgtatcaacgtttccataatagtgtattcgaacgcggtcagtttgatcacttcgtcattaatagataattcacggcgagagagatcaacctgaaacggggggaggctaatgacctgactagccagaccgctattacgccgcattaatgcctgcattcgcgccatcacctcttcaatatgaaacggtttagtcacataatcatcagcaccggcacttaatacttcgactttgtcctgccagctttcacgggcggttaataccagaatcggcagactaacatcgttgctacgccagcggcgaatcagactcagaccgtcctcgtctggcaatccgagatcgacaatcgcaatatccggtatatgttcattgagataataatcggcttctttggcatcttctgcgtcatcgacctgatgaccagcatcctgaatctgaactttaaggtggtgacgtaacaacgcattgtcttcaacaaccagtacgcgcatttttatttctccctgtcttaattattaaaatagtgtaacgcgattatgtggttatgggggtaaacattaaataaaccagcggggaggggaggtaaagtgaaaaaataaaaagcggataatcttaataagcaggccggacagcatcgccatccggcactgatacgaggtttatttcagctcatcaaccatcgtgatagctcgaccaatatagttagccggcgtcatcgctttcaggcgggctttctcttcttctggcaacgccagaccatcgataaactgcttcatgccttcggcgtcaacgcgcttaccgcgagtcagctctttcagcttctcgtacggtttttcgatgccatagcgacgcataactgtctggattggttcagccagcacttcccagttgtgatccagttcatccagcagatggtcacggttcacttccagtttgctcacgcctttcagggtggattgatatgcaatcaaggcataaccgatacccacgccgaggttacgcagcacggtagagtcggtcaggtcacgctgccagcgggaaaccggcagtttgcttgccagatgctgcaataccgcgttggaaaggcccagattcccttcggagttttcgaagtcgatcgggttaactttatgcggcatggtggaagaaccaatctcaccagcaatggttttctgtttgaagtggttaagggcgatataaccccagacgtcacggtcaaagtcgatcagaatagtgttgaagcgcgcaacgcaatcaaacagttcggcaatgtagtcgtgcggttcgatctgggtggtgtacgggttccactgaatacccaggctggtgacgaactcttcgctgaactgatgccagtcaacttccgggtaagcggcgatgtgggcgttatagttaccgaccgcgccgttgattttgccgaggatctccacctggttaagctggcggtactggcgctccatacggtaggcgacgtttgccatctctttaccgatggtactcggcgtggctggctgaccgtgggtacgagacagcagcgggatatcgcgatactgaacggcgagatctttaatgccatcaatcagttgacgccagtatggcaggatcacttcatcacgcgcggttttcagcattaatgcgtgggagaggttattgatatcttcgctagtacaggcaaagtggatgaattcagaaaccgcgtgcagttccgggatctccgccactttttctttcaggaaatactcaaccgctttaacgtcgtggttagtggtacgctcgatagttttgatgcgcgccgcatcttcttcgctgaaactggcgacgattgcatcaaggtaaccgattgcgtcggcagcaaaagcaggaacttccttgatcgctgcgtgcgcggccagtttttgcagccaacgtacttcaacttgtacacggaatttcagcaaaccatattcgctgaaaatcccgcgcagcgcgctgactttatcgccgtagcgtccatcgacaggggaaacggcggtcagactggataattccatagatcacaactccggggttaaatgagcaagaatttgttttgcctgagtggtcaggcgattacgagaaaacatcagttgcagacgtccgccgccgacctggtgccagagcacggcggcgcgaatgcctgccagcagggttgcgcgaactttcgcctgcacttgtgggctttgcagtacagcaggggaaccggtgacctgaatgcgcgggccaagcgggctaatcacatcaacatagatagcagccatcgcgctcatcagcgtttcggactgtaaatcgaagtgttcgagctggcgttgcaggccgttgatccggttgcccagagtgtcgagcgcgcctttcgcactggagagtttgcgctcaagcaccatcaagctgagtgtgtagcgggttaattcggcgtttaagccctggcgactgctggcattgagcacgccgagcagggtttccagcccgacgcgcaggttggcttcgctaccgccaaaaaccgccagcgtgctgctggggttcatatcaataatactgttgagactgacgtgtagcgcatcggcatcacaatgcccctggtgagcgagttgttgcaccaggcgtgcgctctgacaaataccggccagggcgagggtgatgtcatagtaattctttgccacgttcactgcttccttgttttaagtaaagataataatcagaccggcagcggcagacgctgctcaataataccgccaccgaggcacacttcaccgttatagaagacggcagactggcccggcgtcacggcggcaaccggttcatcgaaaatcacttcaatgcgatcatcgtccagcgccttgacggtgcaagggatatcggtctggcgatagcgggtttttaccgtgcaacgcatagtgccggtgaatggttcgcgatcgacccagtgcaactgctgggcaatcaacccgacagacatcagccgcgggtgttcatggccctgagcgacaaccagaatgttgttttcgacgtctttgtccaccacataccacggttcttcggtaccttctttggtgccaccgatacccagacctttacgctgaccgagagtgtgatacatcagcccctggtgctcaccaatttcatcgccatcgacggtaatgattttgcccggttgcgccgggagataacggcccaggaactcgcggaatttacgttcgccaatgaagcaaatgccggtagagtcttttttcttcgcggtgaccagaccaagatcttcagcaatcttacgcacctgcggtttttccagttcgccgaccgggaacaggctttgcgcaatctgctcatggctgagcgtataaaggaagtagctctggtctttattgctgtccagaccacgcagcaggcggctcttgccatcgacatcggcccgacgtacgtaatgaccggtagcgatataatcggcacctaaatcttcggcggcaaattcgaggaaggctttaaatttgatctctttgttgcacagaatatccggattcggcgtgcgaccggctttatattcggcaaggaacagttcgaagacgttgtcccagtactcggcagcaaagttaacggtgtgcagttcaatgccgagcttgtcgcagacagcctgggcatcagccagatccgctgccgctgtgcaatattcctcaccgtcgtcttcttcccagttcttcataaacaggccttcgacctgatatccctgttgttgcaacagccaggcagaaacggaggaatcgacaccgccggacatgccgacgattactttttttgcggtttcagacattggatcactcacgacattgaacttcaaggcggcgtattctatcacgcagccttttagatgacaccctttgtaaaaggccagttaaaatcgccaatcatctccagcggataacgttgcccgctttgataacaacgaatactttccgccaccagcgggctacgaagattactcgcctgtaaaatttcttcggcgctgacccaacggcagcagtcgatatcgctgtcatgaggctgggtcgggcatatttgctcaagctcaatggcaaagaggaaacgcaaaaacggcgttttatctggcgcaatccactgatgcatacgaataaagtgttgcggctgcgcgctgatgccggtttcttcccacagttcacgggcggcggcttccactaaggtttcatcggcttccagatgcccggcaggttggttccataacgctttaccattaatcgtctcttcaacgactaaaaatttgccttctgcgtgcaccacgcaagcaacggtaacgtgcggtttaaacattttgcatccttaatctgtcacttctcgccattcaccattggcaagattatccaaagagtaatcacccatcgcatagcgaatcagtcgcagcgtggggaagccaacatgggcggtcatgcggcgcacctggcgattacgtccttcatataaggtgatcttcagccagctggtgggaatacttttgcgttcacgaattggtggattccgcggccataaccacgcgggttcgtcaaccagctccgcgccggcgggcagggtagggccatcatttaaggttacgccattgcgcaaggcttcaagtgcgtcttgtgtgggaataccttccacctgcacataatagatttttccggtgcgtttacccggctgggttaaacgcgcctgcaacgcgccgttattggtcagcaccagcaacccttcgctatcgcggtcaaggcgacctgctgcataaacaccctgaaccgggatgaattcttttaatgttttgcgtccggcttcatcggtgaactgcggaagaacatcgtagggtttattgaacaggatcacacgcgtgggctggttttcaggtttacgcctggtagaacgttggctgctgaatcgcttaacctggtgatttctaaaagaagttttttgcatggtattttcagagattatgaattgccgcattatagcctaataacgcgcatctttcatgacggcaaacaatagggtagtattgacaagccaattacaaatcattaacaaaaaattgctctaaagcatccgtatcgcaggacgcaaacgcatatgcaacgtggtggcagacgagcaaaccagtagcgctcgaaggagaggtgaatggaaagtaaagtagttgttccggcacaaggcaagaagatcaccctgcaaaacggcaaactcaacgttcctgaaaatccgattatcccttacattgaaggtgatggaatcggtgtagatgtaaccccagccatgctgaaagtggtcgacgctgcagtcgagaaagcctataaaggcgagcgtaaaatctcctggatggaaatttacaccggtgaaaaatccacacaggtttatggtcaggacgtctggctgcctgctgaaactcttgatctgattcgtgaatatcgcgttgccattaaaggtccgctgaccactccggttggtggcggtattcgctctctgaacgttgccctgcgccaggaactggatctctacatctgcctgcgtccggtacgttactatcagggcactccaagcccggttaaacaccctgaactgaccgatatggttatcttccgtgaaaacagcgaagacatttatgcgggtatcgaatggaaagcagactctgccgacgccgagaaagtgattaaattcctgcgtgaagagatgggggtgaagaaaattcgcttcccggaacattgtggtatcggtattaagccgtgtagcgaagaaggcaccaaacgtctggttcgtgcagcgatcgaatacgcaattgctaacgatcgtgactctgtgactctggtgcacaaaggcaacatcatgaagttcaccgaaggagcgtttaaagactggggctaccagctggcgcgtgaagagtttggcggtgaactgatcgacggtggcccgtggctgaaagttaaaaacccgaacactggcaaagagatcgtcattaaagacgtgattgctgatgcattcctgcaacagatcctgctgcgtccggctgaatatgatgttatcgcctgtatgaacctgaacggtgactacatttctgacgccctggcagcgcaggttggcggtatcggtatcgcccctggtgcaaacatcggtgacgaatgcgccctgtttgaagccacccacggtactgcgccgaaatatgccggtcaggacaaagtaaatcctggctctattattctctccgctgagatgatgctgcgccacatgggttggaccgaagcggctgacttaattgttaaaggtatggaaggcgcaatcaacgcgaaaaccgtaacctatgacttcgagcgtctgatggatggcgctaaactgctgaaatgtagtgagtttggtgacgcgatcatcgaaaacatgtaatgccgtagtttgttaaatttattaacgggagcgtaacgctcccgttgttttttgttaggctgctaacggttatcaaaattttatcaaaaaaagttatcaaaacccctcggtagttttggggtaggctggccggtcaggtggtagttctactactagtctcccacatagatattccttagctttttattattgctggcggacgctcgttaatatttaaggtcttcattgattaagacatccccaaagttagttatgtattcactgttattaggacaattatgaattaccactccttacacccgctcaaatattgttaaattgccggttttgtatcaactactcacccgggactcgccaggggacagccaacaggcattgggtgcaatcaccttagcgttcaggtacatgcggaatgtaaaaaaggccgcgagcgcggccccttcacatacatctttagtactgagactgtttaacctagggaattattatcgtattatattgcattacaactcccaacagtgacatatgaacttcctgctttactccacgactttaatatttcaaggccatgtgaagaacatatttcttgcactgcgagttcatcgagtaatccatagtaagaaacactttttgaatttttgtaaatgtatccgtaaagatgttttcttcctgtttcgtattttttgaagtatgagcttttatattgatttacaataagagtctcacctcctgattttagtaatctcttgatgctaagaactatcagataattcaaagcgtggctgtgatgataggaattatgttttttacgtgaatgagaataatcttaaatgaggaataactcattgattgacaatatttttattcaagaagtgtcattgactgttaacgcaatgttgtaaaggtaagataatctgatttatcaatattattgtgtgatttttatgtgagcagaagatattcatcagcaacgattacattagtcattttattttgccgacggcctcattgtcgaaagataagcgtacgacagtattatcagaaaagagtgattttttatccaactacacttcagcgcactgcgtgtaaaaaatgcctctttcttatgcgggatatcatcatttcatcatgatgtctttggtgagcggtgaacacaatacacctgcgctgtctcttcaggatgaatcccctggtctggtgcctgcgggctgatgttgcagcagagcttaggagtcttagacgctactatcatttatccaatggcatggaaagcaaaagtgtcgatacccgcagtatatatcgtgaactgggtgcaacgctgagttacaacatgcgcctggggaacggtatggaaatgaaccctggctgaaggcggctgtgcgcaaagaatttgtcgatgataaccgggtgaaggtgaataatgacggtaatttcgtcaatgatttgagcggcagacgtggaatataccaggcagctattaaagccagtttcagcagtacgtttagcggacatctcggggtggggtatagccatggtgccggtgtggaatccccgtggaacgcggtggctggtgtgaactggagcttctgaccatcaacgattaaactgcgcttcggcgcagttttcgtttacaggatgttgaaagggaaaattctggggcaaaaaaagcccgccagttacggcgggaaacctcatcctatgggagaacaatgaataatgaaattgcggggttatcatctcccagtatatccatactaacaataaggttatttactcaaccaggcataaacattttgttttgtgcgtgggaacagccttaaggtgtaaagggggaggtggaaatagcaatgaggagtatcagcaagaatactcgccgctttaccacaacgtggatgagagggatgaaaaactcaaggcagagataactctgccttgaagataaatgcgcttttacagcgggcttatttcagctcttctgcttccggtaaggtcacgttcagctcaagaatagaaatatcgccatctttttgctcaagctgtacggttaccatctcaggatcaatttgtacgtatttacaaatgacctcaagaatatctttacgcaactgcggcagataatgcggttctgcatcgctgcgacggcgttcagcaacaataatctgcagccgttcttttgcaatgttggctgtgtttttcttccggctgagaaagaaatcgagtaatgccataacttatcctccgaacaagcgtttgaggaagcctttcttctcttcttcaatgaagcggaaaggacgttcttctcccaacagacgttctacggtatctgcgtaggctttacccgcatcggcgttaatgtcgagaatgaccggttcaccctggttagaggcgcgcaatacactttgatcctctgggatcacgccgacgagtttgatgcgcaggatctccagcacatcttccatgctcagcatgtcacctctgcttacgcggcctgggttatagcgcgttaacagcaggtgctctttaataggctcttcgccattttctgcgcggcgacttttgctcgccagaatgcctaaaatacggtcagagtcgcgtacactggagacttccgggttggtggtaataatggcttcgtctgcaaaatagagtgccattaacgcaccggtttcaatccctgccggggagtcacaaacgataaattcaaaatccatcgctttcagatcatcaagaactttggcgaccccttcacgggtgagggcatctttatcgcgtgtttggcttgccggcagaatatagagattttcagtacgcttatctttaattaacgcctgatttagcgttgcatcgccctgaatgacgttgacgaaatcgtaaacgacccggcgttcacaacccataatcaggtcgagattacgcaggccgatatcaaaatctatcacgacagttttctttcccttctgggccaaaccagtggcgatggccgcgctggaggttgtcttaccaacaccccctttgccgctagtaacaacaataatgcgtgccatagaaattccttgttaaaaagggatcaatttaacggttgaacggtcaaagcgttttcgactaactgcagtcgcgccgctttgccataaaattctgctgggatttgatcactcagccagtattcacctgcgatggacaccagttccgccatcaggttcgtacaaaatatttgcgtttcccggtcaccacttgcccctgccagcgcacgaccgcgcatcatgccatagacatgaatgttcccatcggcaatcaattcggccccagcgctaacgtggcttgtaacaatcagatcacattgtggagcataaatacgctgaccggaacgcaccggggtatctattaaacgcgtttttgtgaccggcgttgtattttgcgctggagcctgcggtgtgggagctggacgtggcgctttttcctttccttccgtcaggataggcagccccatcttttcaatttcggctttaagttgcgcatctttgcagccacttacgccaataacccgcaaaccggttgcgctaaccgccttatgcatcgcactccagtttaccgggtcttccagtgcactgacgttgagtacaacgggggcatgttttaaaaatgcgggggcctgagcgattttgtcttccagcgcctgatggataaccttaggttctgcctcatgcagatgaaccacagataaagtgaagctactgcctttaagctcgattggcgtgttactcatcctggccttactcaattagctattaatcatcgccagcgcgcgatgatgttccgaagactataaggcatgttatagtctggattatattgaggcaagtcaccctcccatttattcagagtaaaagtctattctgtgataaatggcgctgattcatagcttaaaaaatacccttgtcaatcaacccattgccgtcgtacttttgattgttcttatttacgcttcctttttccgcaccctaatcgtgacagcatctccagacctgtttaaatatccagtattgaggcaagtgtattttttcaccacgccaggctttcttaactttccattttttgcggcatcattaaagaacagatacccgttatcttaatatccgccacagaattgctctatcatagaaaccgcagaagacgtctgatacttctgtcaggtcatcgtaactcgtccaggtcagcggttttgattacggattgatgatgaaatgagcataagtgttgtacggttggattatcaggatgtgctatgaatatgatgcgtattttttatatcggattgagtggtgtggggatgatgttcagtagtatggcgtctggaaatgacgctggcggacttcaatctccggcgtgcggcgttgtttgcgacccgtatatttgtgtgaacagtgatggcatttccccagagttaacaaggaaatatctcggcgaaaaagccgctgaaaacttacaaagtttacaaggctacgatcccagcgaatttacattcgctaacggtgtattttgcgatgttaaagaaaaattatgtcgtgatgatcgttattttggtgtggatggtaagcggagtggaaaaatcaatcaaaccaccacaaagatgttatttatgtgtcgtgagtgatgtcttgtttacattatgttctattcgtcattaacctcttgagcgacagagaggagtggggcattaacgtttatgacggggagagtccccgtcggttgacatttacttaatttgaatatcgacgttatattttttagttttgtttttacgggcgtcgtttcgggtttgcaacactcgcagctcatatttgccagaagcagggagactgtattgtccgtgactatcgagttctggggaatatctggataaatcaacactatcatcgattcctggcccgaagaggtaagtatcagcgccttcattagagatactcacatgcactttctgaccttttttggcatagaaggtatatgtatcgtaatcgtatccctttatttcgccggagtactgagcgctgctatggccttttctgaactcaacattgacattcttacccgcagcaaagctcgtggaggttagcagtgcaagcagcaatacagccttcctgatgctcttgattttcattggtagtctcctgttcagaatgagtacgatgaactgttataatataacaatccctaacgggagaattccagtggctttcctgcgttcggtaaaatcacgttgcggcatttttgccggggggattacttataaagggggcatggactcaacaaaccgtagaaatctacagctggctggcttgtggcgcgggtttcattgatgttagcttatgccaaaacctggcatcttaaagagtaaaagtatgttttgtgtgatttatcgaagcagcaagcgtgaccagacctatttatatgtcgaaaaaaaagacgattttagccgtgttcctgaggaactgatgaaaggttttggtcagcctcagttagcgatgattctgccgctggatgggcggaagaaactggtcaatgccgatattgaaaaggttaaacaggcattaaccgagcaaggttactatttgcagttaccgccaccacccgaagatttgctgaagcaacatctttccgtcatggggcagaaaacagacgacactaacaaataaccgatatccggcggtggcattatctttgtcggcgcgggttttcatatccacgataaggtgaggggaacgttatgtatcaacatcacaactggcaaggtgcgctgctggattatccggtgagtaaagtagtctgtgttggcagtaactatgccaaacatattaaagagatgggcagcgcagtgcccgaagagccagtgctgtttattaaaccagaaacggcactgtgcgatctgcggcagccattggcgatcccatccgatttcggtagtgttcatcatgaagtcgaactggcggtgttgattggcgcgacactgcgtcaggctacggaagagcatgtccgcaaagccattgccggttatggcgtggcgctcgatctgacattgcgtgatgttcagggaaaaatgaagaaagccgggcagccgtgggaaaaggctaaagcgtttgataactcttgtccgctttccgggtttattcccgcggcggaatttaccggcgacccgcaaaatacaacgctgagcctgagcgtaaacggcgaacaacgccagcaaggtacgactgcggacatgatccataaaatcgttccgctgatcgcttatatgagcaagttttttaccctcaaggccggtgacgttgtgttgacaggcacgcctgatggcgtcggcccgttgcaaagcggtgatgagctgacagtcactttcgatgggcattctttgacaactcgcgttttgtaatactttttgccgcctgaaagcggcggcaaaacttgcatcgctgtgccagactggttataaggtgcgttttaacgtaatggcggaacacctgatgagcgatgtacctttctggcaaagtaaaaccctggacgaaatgagcgatgcggaatgggagagcttgtgtgatggttgcggtcagtgttgcctgcataaactgatggatgaagacaccgacgaaatctacttcactaacgtcgcctgtcgccagctcaatattaaaacctgtcaatgtcggaactacgaacgtcgtttcgagtttgaacccgactgcattaaattaacccgtgaaaatctgccaacattcgaatggctgccaatgacctgcgcttatcgtttgctggcggaaggtaaagatttacctgcgtggcatccgctacttactggtagcaaagcggcaatgcatggtgaacgtatctctgtgcgtcatatcgcagtgaaagaaagtgaagtgattgactggcaggatcatatcttaaataaacctgactgggcgcagtgataaatttaatagatgctgatgggggctttcttaatatacgtctggatgctcgccatttcgtagccctgtttttgaaagcgctctgtcataatgagagttacccgataccttattatcaacaggtaactctcaatctttaaaaaacgtctgtgtttttaaatgtgataaaccttataccttgagtacatggagagaataatcgcttatcagacttcaggtacctcaaagagtgtctttttaccgtgtcttttctgatactcattacaggtgttaatcatttttttggccgcttcttttagcaaagaaagcattaaatcatcataatcaacgtagaatctggttgtttcagtttccgtttttatctcaccgatggcggctatttcggtggttaatttcaatttggcggcatcgatatctttattcgcttgtttaaccgtgttagacagggtggtaaagaaattctgcacagattttaacttgttcttcaattctggaatcagttttccttcaactacgcccgcagcaatagaataggaaatgattaatccaaatggaccggcgacgacaccggctgcggcaccggcatatgcttccttcctgattttatctacctgactctggaaatagctgcttttttcactaaaatcattggttaactggctatctaacgccagcagtttcccggaagcgttgttgaaactttgactgcttaccagcagggatttttgcgcttcattcagcttcgtgatgccgtcatccagtaccttaatgagaatgtctttctgggcggatgctttcttctcattgtactcatcaaatagcaaaatatacgctgcgagcaattgcgtcgcaacaccacaccattcatacactgtttgggttgcttcaaaatacttatcctggctatccataagtaaggttttaatatcgccgactaaaacggaggctgcctgactatactcctgtttaaagcgacttaactcttttatggtttcatcaaaggtctgccaggggatgacctgatcgagatatttattataaagatctaatgctccatctgcggtttcgattgcgtttttaactacttctaccgttttatctgcaacgatttcagtcataatcattcgcctctttaaatatataaattgtaatgaaactcctgttttacaactattaataaattttacttcatctaattcatagttagccgggcgggatgcgtcaatgtctttatttctattaatatgataaatatcaaacaatgtttaatgtcattatggcgaatgcttctattctattttttagccgggtgatatttttcatttctgctggatgagcgtcgtcgccagaaggccacgtgagcacaagataagagaacgaaaaatcagcagcctatgcagcgacaaatattgatagcctgaatcagtattgatctgctggcaagaacagactactgtatataaaaacagtataacttcaggcagattattatgttgtttatcaagcctgcggatctccgcgaaattgtgacttttccgctatttagcgatcttgttcagtgtggctttcctagtccggcagcagattacgttgaacagcgcatcgatctgaatcaactgttgatccagcatcccagcgcgacttacttcgtcaaagcaagtggtgattctatgattgatggtggaattagtgacggtgatttactgattgtcgatagcgctattaccgccagccatggtgatattgtcatcgctgctgttgacggcgagtttacggtgaaaaaattgcaactacgcccgacggtacagcttattcccatgaacagcgcgtacagccccattaccatcagtagtgaagatacgctggatgtctttggtgtggtgatccacgtcgttaaggcgatgcgctgatgtttgccctctgtgatgtaaacgcgttttatgccagctgtgagacggtgtttcgccctgatttatggggtaaaccggtggttgtgctaagcaataatgacggttgcgttatcgcccgaaacgctgaggcaaaggcgcttggcgttaaaatgggcgatccctggttcaaacaaaaagatctgtttcgtcgctgtggcgtggtttgctttagcagcaattatgagctttacgcagacatgagcaatcgggtgatgagcacgctggaagagctaagcccccgcgtcgagatttacagtattgatgaggcattctgcgatctgacaggtgtgcgtaattgtcgcgatctgactgattttggcagagaaattcgcgcaacggtgctacaacgtacccatcttactgttggtgtggggatcgcccagaccaaaacgctggctaagcttgccaatcatgcggcaaaaaaatggcagcggcagacgggtggggtggtggatttaagtaatctggaacgccagcgtaaattaatgtctgctctccccgtggatgacgtctgggggattggacggcggatcagcaaaaaactggacgcgatggggatcaaaaccgttctcgatttggcggatacagatatccggtttatccgtaaacattttaatgtcgtgctcgaaagaacggtgcgtgaactgcgcggcgaaccctgtttgcaactggaagagtttgcaccgacgaagcaggaaattatctgttcccgcagctttggtgaacgcatcacggattatccgagcatgcggcaggccatttgtagttacgctgcccgggcggcggaaaaacttcgcagcgagcatcaatattgtcggtttatctccacgtttattaagacgagtccatttgcgctcaatgaaccttattacggcaatagcgcgagcgtaaaactgctgacgcccactcaggacagcagggatatcattaacgctgctacgcgatctctggatgccatctggcaagcgggccatcgttaccaaaaagcgggcgtgatgctgggggatttcttcagtcagggagtcgcgcagctcaatttattcgatgacaacgcaccgcgccccgggagtgagcaattgatgacggtaatggatacactgaatgctaaagagggcagaggaacactctattttgccgggcaggggatccagcaacaatggcagatgaagcgagccatgcttagtccacgttatacaacgcgaagttctgatttactgagggtcaaataaatatagcggcaggaaaaaagcgctcccgcaggagcgccgaatggattagcgaccgaacagatcacgttttttcgctttaaacggctgggaaatcaccaccagcactgcgacaatcaggtaagcgataaaaataccgagcagccactgcggcatttccagacctaaaaaatcccactgacgctcggcgcaatcgccagaggcgacaaacacttgcggcacccacttatccagcggcagccattccgggaaacgaaccataaaatcacaggtggcaaacgggctaggatagagctgaagcatggtgtgctcgtaagttaactgcacaccgcggaacgcactatacaaccagataaccatcgctacataacgcagcggagttttcggggcgatcgcgccaatcagcgcagcacccagaacgccgaataacgcgcagcgttcataaatacagagcacgcaaggtttcagtaacatcacatgctggaaccacagcgccgtcagttccagtgccagagcagtaaacgccatcaacagccacgcgccccggccttgactacattggttcaaaaatcgcaacataatcatttccctgcaatatgcatagagtgcgcagtttaaaccaattcattcgctgcgccaccaggaggcagcaaaaataggacgcaattggacaattatcgggcgaaaaggcaaaccgggcatttatatgcccggtaagttgttatcaaagcgttgctatccagcccatttgcataaaccattcggttacaggggcaagcgtaaactcgacgcagagcaagccgacgagtgtcaggacgagggtgtaaggcagggccatccacaccatgcggccataagagaggcgaatcaatggcgcgagtgcagaggtcagcaggaacaggaacgcagcctgaccgttcggcgtagcgacggagggcagattggtaccggtattaatggcgaccgccagcagctcgtattgcttcaacgtgatagcgccactttccattgccgctttcgcttcgttgatataaatcgtccccacgaagacgttatcgctaatggaactcagcagaccgttgaaaatatagaacaggctcagctgagcatgttcgcttgcctgcaacacaaactgaataattgggctaaacagttgttggtcgataatcaccgcgactacgctgaaaaacaccgtcaacagtgcggtgaatggcagagattcggtgaaggctttaccgatagcatgctcatcggtgacaccggtcaaacttgttgccagaataatgacactcaaaccaatcaagccaacttccgccagatgcaacgccagcgcagtcaccagccagacgccaataatcgcctggacaatcagacggattttatcctgacgggtacgctggtggcggctttgatcgtcaaactgttgcaacacttcgcggactttctccggcagcgtttcaccgtagccaaaccaacgcagcttctctaccagcaggcaggttaacaggccacaaatcagaaccggaacggtcaccgggctcatgcgcaggaagaaatcgccaaaatgccagccagccgctttagcgatgatcaggttctgtggttcgcccaccatggtcattacgccgcctaatgcggtgccgacaccggcatgcatcatcaggctacgcagaaagccacggaactgttccagaaccactttgtaatgcttgtcgatatgactatcgtcttgcaggtcggtgtcttcggtacgggaagaggctacgcggtgataaataccataaaaaccgactgcaacgctgatcaccaccgccacgacggttaaggcatcgaggaacgcggagaggaacgcagccgccacgcaaaaagagaggctcagcagcattttggagcgaatgcttaacagcaaacgggtaaatatgaacagcaacagctgtttcataaaatagatacccgccaccataaacatcagtaacagcaagacttcaagatttgccgccacctcttcacggacgtgttccgcgctggtcatgccgatgaataccgcttcgatagccaacagaccaccggggagcagcgggtagcatttcagggccatcgccagagtgaaaataaattccgctaccagcaaccagcccgcgacgaaagggctgatgaggaaaattaacgggtttacgattaagaaaatgatgagggcgagtttgtaccagtcgggggactggcccaaaaaattgcgccatagcgcgcggccccaggagatctccatgatggtttcccttaccttacaaataatcaatgatgtttttatgtttaaacgcaaagcttaacggtcaggcaggagtgaggcaagtcttgatagtcaaggggaaagagatgcggaaaatgaagccttgatccctttttcttctttttgtctgctatcagcgtagttagccctctggtatgatgagtccaactttgttttgctgtgttatggaaatctcactatggtcattaaggcgcaaagcccggcgggtttcgcggaagagtacattattgaaagtatctggaataaccgcttccctcccgggactattttgcccgcagaacgtgaacttagtgaattaattggcgtaacgcgtactacgttacgtgaagtgttacagcgtctggcacgagatggctggttgaccattcaacatggcaagccgacgaaggtgaataatttctgggaaacttccggtttaaatatccttgaaacactggcgcgactggatcacgaaagtgtgccgcagcttattgataatttgctgagcgtgcgtaccaatatttccactatttttattcgcaccgcgtttcgtcagcatcccgataaagcgcaggaagtgctggctaccgctaatgaagtggccgatcacgccgatgcctttgccgagctggattacaacatattccgcggcctggcgtttgcttccggcaacccgatttacggtctgattcttaacgggatgaaagggctgtatacgcgtattggtcgtcactatttcgccaatccggaagcgcgcagtctggcgctgggcttctaccacaaactgagcgcgttgtgcagtgaaggcgcgcacgatcaggtgtacgaaacagtgcgtcgctatgggcatgagagtggcgagatttggcaccggatgcagaaaaatctgccgggtgatttagccattcaggggcgataatcccttccgtttaaagagcaaacccctcaaacgaggggttttttgttgtttttacagatttcccattcttggcgggcaacgttccagcaactcgatgctgccgtcttcgttttgctgttcgagcatcacatcaaatccccacaggcgatgcacatgcttcaggacttctttgcgcccccgatccagcggtgcgcgattatgtggaatataacgcagcgtcaggctacggtcgccgcgcaaatccacgttccagatctgaatattcggctccagattacttaagttatattggctgcttaaccggttacggatctcccgataaccttcttcattatgaatagcggaaatctccagataattatgccgatcgtcatccagcacggtgaagaagcggaaatcacgcatcactttcggactcaggaactggctgataaaactctcatctttgaaatcacgcatcgcgaaatgcagcgtttccagccagtcggaaccggcgatatccgggaaccagtatttgtcttcttccgttgggctctgacaaatccgtttaatatcctggaacatggcgaacccgagggcatacgggttgatgccgctgtaccacgggctgttataggggggctggaagaccacattggtgtggctgtgcaaaaactccagcataaaacgttccgttactttcccttcatcatacagatggttaaggatggtgtagtgccagaaggtcgcccagccttcgttcatcacctgagtctgtttttgcggataaaaatactggctcaccttacgcacaatacgcaggatttcacgctgccaactttccagcagtggcgcatttttctccataaaatagagcaggttttcttgtggttcggacggatagcggcgcgcttcagcaaccgttttctcttcctcgcgcttcggcagggtacgccagagcatattgacctgactttgcagatactcttcgcgacttttctgccgggctttctcttcttgcaggctgattttttgcgggcgtttgtaccggtccacgccgtagttcatcagcgcgtggcagctgtccagaagccgttctacttcatcaacgccataacgctcttcgcactcggtaatatatttacgggcaaaaatcagataatcgacaatgctactggcgtcggtccagctacggaataagtaattgtttttgaagaaagagttatgcccatagcaggcatgagccatcaccagcgcttgcatggtaatggtgttctcttccatcaggtaagcgatacacgggttagagttaatgacgatttcataggccagtccttgctgaccgtgcttatacagccgttcagtctcgataaactttttaccgaaactccagtgcggatagttaattggcatgccgacgctggagtaggcatccatcatctgttcactggttatcacttcaatctggtgcgggtaggtatccagccggtagagtttcgccacccggtctatctctgccagataaacatccagcaggtcgaacgtccagtcgggtccatcgctcaaacgtgtggtgtccttattcatagaatcgatcgtcgccatacgcgcacctcattgttgtcggcgctctctgtgtggagcacctcatttcaagcatagaacacctgttaaaaaccgcgtcgccggagaatttttttctttgcgatttcttattatcagagtgccactaatccgcttctgaacggaattttatgctggataaaaagggcgttcagcaggagatactaaagacgccatattgccgcagagtcagggagatgtgagccagctcaccataaaaaagccgcatgttgaataatattttcaactgagttatcaagatgtgattagattattattcttttactgtatctaccgttatcggagtggctatgcgagttgtcatactgggaagtggtgtggtaggcgttgccagcgcctggtacttaaatcaggcaggacatgaggtcaccgtcattgatcgggagccgggggccgccctggaaaccagtgccgcgaatgccgggcaaatctcccccggatatgctgcaccgtgggcggcaccaggtgtgcctttaaaagcgattaaatggatgttccagcgccatgcgccgctggcggttcgtctcgacggtacgcagttccagttgaaatggatgtggcaaatgttacgtaactgcgacaccagccactacatggaaaacaaagggcggatggtgcgtctggcggaatacagccgtgattgcctgaaagcattgcgcgccgaaaccaatattcagtatgaagggcgtcagggtgggacgctgcaactgttccgtaccgaacaacagtatgaaaatgcgacccgcgatatcgccgtgctggaagatgccggcgtaccgtatcagctgctggaatccagccgcctggcggaagtggagcccgcgctggcagaagtggcgcacaaactgacgggcggcctgcagttacccaatgatgaaaccggagactgtcagctatttacccagaatctggcgcggatggcggagcaggcgggggttaaattccgctttaatacgcccgttgaccaactgctttgcgacggcgagcaaatctacggcgtgaagtgtggcgatgaagtgattaaggccgatgcgtatgtgatggcgtttggttcttacagcacggcgatgctcaaaggcattgttgatattccggtgtatccgctgaaaggctacagcctgaccattccaattgcgcaggaagatggtgcgccggtatccaccattcttgatgaaacctacaaaatcgccattacccgtttcgataaccgcattcgtgttggcggaatggcggagattgttggttttaataccgagctgttgcaaccgcgtcgtgaaacgctggagatggtggttcgcgatctctatccacgcggcggtcatgtcgagcaggcgactttctggactggtctgcgcccgatgacgccagacggcacgccggttgtcgggcgtacacgctttaaaaatctgtggctgaataccggtcacggcacgctcggctggacgatggcttgcggttccggtcagttgttaagcgatctgctctctggtcgcacgccagcgatcccatatgaggatctaagcgtagcgcgctacagccgtggatttacgccaagtcgtccgggccatttacatggcgcacacagctaaggaaacgagatgacccgtccgatacaggccagcctcgatctgcaggcattaaaacagaatctgtccattgtccgccaggccgcgacgcacgcgcgcgtctggagcgtggtaaaagcgaacgcttacgggcatggtattgagcgtatctggagcgcgatcggggccaccgatggctttgcattgcttaacctggaagaggcaataacgttacgtgagcgcggctggaaaggaccgatcctgatgctggaaggatttttccatgctcaggatctggagatttatgaccagcaccgcctgaccacctgcgtacacagcaactggcagctcaaagcactgcaaaatgcgcggctaaaagcaccgttggatatttatcttaaagtgaacagtgggatgaatcggttgggcttccagcccgatcgcgtgcttaccgtctggcagcagttgcgggcaatggcgaatgttggcgaaatgaccctgatgagccattttgccgaagcggaacatcctgatggaatttccggcgcgatggcgcgtattgagcaggcggcggaggggctggagtgtcggcgtagcttgtccaatagcgcggcgactctgtggcacccggaagcgcattttgactgggttcggcctggcattattttgtatggcgctagcccgtccggtcagtggcgtgatatcgccaataccggattacgtccggtgatgacgctaagcagtgagattattggtgtccagacgctaaaagcgggcgagcgtgtgggctacggcggtcgctatactgcgcgcgatgaacagcgaatcggcattgtcgccgcagggtacgccgacggttatccgcgccacgcgcctaccggtacccctgttttagtggacggcgtgcgcaccatgacggtggggaccgtcagcatggatatgctagcggtcgatttaacgccttgcccgcaggcgggtattggtacgccggttgagctgtggggcaaggagatcaaaattgatgatgtcgccgccgctgccggaacggtgggctatgagttgatgtgcgcgctggcgctacgcgtcccggttgtgacggtgtaacttgttgtaagccggatcggaggcaacgtcttctgggtgcaaaaaaatcatccatccggctggtcagcaactgtagttgttaatgtgacagagccattgcccatgatagtgtccattaaaaggatggacactatttccccggaacctgaactcaccgcacaggcgttctacataaaacgcttacgcttcattgttgactcgaactcgacttcagataaatcacgctttacccttgatggagcctgtacatagatttgtgtaattgcctgattttgatatgttcaattcaacatcaaatgaaggttaaattatggacgacaaacaattgcaggctcaggctgcgttcagcaaagcatcgcaaccggcgatagatgcttcattaaatttaagattcagcttcctcttcagccacccgtacgccaatcttcaacacttcattatcttctttctcggccaccgtccagatcatcccggcaaactctacctggtcaccgacaaccggtgccgcgcctaacaactgctggacaatttcacccagcgtttgctgcttatcacgatattctcgcccgtcttccaggccatatatcagcgcaacatcagcatatttggcgctggcttcgagaatgaagtcaccaaagaagcgttgatccagcgcgaccggcgggctctggctgaacagtttaccgagcgccggaagatcgcgttcccgaccaattacacacaacacatcgccttcgcgcagtcgggtgctgccggtaggatgaagcaactggttatcacgaaacagtgccgcaatacgcgtctcttttggcatatgcaaatcgcgcagtgccgcgcccacgcaccatttatcggcactcaattgataaacaaactgctcccacggattttccggatgaatatccaggccaacgcgactcaccggacgtcccactggcggaaccaccactttggcttttttagccgcccagctgagacttgttccctgcaagagcagactaaccagaaccacaaagaaggcgacattaaagaacagacgtgcattctccagccccgccatcatcgggaacacggccaggatgattggcaccgcgccgcgtaatcctacccagctgataaacacgcgctcacgcagattgaaaccgcggaaggggagcaatccagcaaatacgctaaggggacgggcgaagaatatcatccatgcggacaaaatgagcgccggaatggcaataggcagcagatcgcttgggttaaccaacagccccagcaccaggaacatggcgatttgcgccagccaggcgaggccgtcgaaattttgcaggatgccgtagcggttgcgaatagggcgattacccagcagaaaaccgcacagatacaccgccagaataccgctaccttccagcgcagtagttaaactgaaaatcagaataccgccacttaatgccagcaatggatataatccggcgggcagggcgatgcggttgatcatttgcagtagtaaataaccgccgccaagacctattacaatgcccagaccaaattgttgcagaatatcgacaatgaacatccagctaatattgctctcatgatgctggatcatcgcaattagggtaatcgtcagaaagaccgccattggatcattactgccggattcaatttccagcgtgctgccaacacgttcgttaagccccttaccacccagcagagaaaagaccgctgcagcatcggtagagccgacgatagcgccgattaataagccttcaatcaaatcaagattaaacagccacgccgccatcatgccggttaaaccagaggtgataagcacgcccagcgtcgccaggctcagtgccggtcctaacgccacacgaaaggaactggcctgagtgcgcatcccgccgtcgagcaaaataatcgccagtgccaggttacttaccatgtaggcgaaggggtaattatcaaacgggataccgccgacgccatcgactcctgccagcatgccgatcgccagaaaaataaccagaataggaatgccaagacgggaagaaaaactactaagtaatatactgctggtgacaaggatggatcctaagatgaaaaggctaattattgttgtggcatccaacggtcggttactcctgattacgctgtctcttatataaaccctaccatattagcggcagagacagcgttttacttagccctgaagcgtgatttttttacattttaagaacaggatgaccgctaatcgtcaactgagtgccttcccgggtgttattcagaatggcatgtgcgcccaacggcagcgtaaccgtgcgttgttcatgaccaaaatcgaggccggtaatgagtggaatgctcaggcgggaacgcaaaaacgcgtacacactctccaggttgtaacctgcgtcataatcattgggcgtgctgccgctaaagctaccgagaataatcgccttctgacgtggcaaaattcccgcatgatagagctgcaacagcatacgttcgacccggaaagggtgctcgttaatatcttccagcaccagaataccgttctcaatttttggcatccacggtgtaccgatcagactaatcagcatcgcaagattgcctccccacaacgtgccttcggcccgacatgtcgggccttccccttgccattcaatggtgaaggtttcattgcgtaacgccagccagaaatggtgctcggtaaaggcgttcagttcatccgcgccaaagtttgctaccagcatggggccgctaaaggtgatgacattgccatgcgccagaagaccgcactgaatggcggtaaaatcgctatgtccgcaaatgagcaacgggtcatgttgttggcgagccaccagtgcctgccagtcaatatctgccagtaaacgactggcaccgtaaccgccgcgtacagccagcacgatggtgttgggggtagtcagtctggcaagggaattgagatcttccagacgctctgtttccgtacccgcaaaacgctcacaacgacgggcaataacctcgacgttattgacttgatgccccgcgtcggtaaggcgctggataccacgcagcgcggcgtgctgtttaatgcagtaaccgcttggggcaattaagtgaaacagagacatggcaattccttgctgacaacagaaacgaaatgtatatcatgccgcttaggtgtgccgttgtcacctcaacggcgattccaggctataaggatagaagaagtgaaattgagatggtttgcctttttgattgtgttattagcgggttgtagtagtaagcatgactatacgaacccgccgtggaacgcgaaagttccggtgcaacgtgcgatgcagtggatgccaataagccagaaagccggtgcagcctggggcgtcgatccacaattgatcacggcgattatcgctatcgaaagcggtggtaatccgaacgcggtgagtaaaagcaatgccattggtttgatgcagttaaaagctagtacctccggacgtgatgtttatcgccgtatgggctggagtggtgagccgacgaccagcgagctgaaaaatccagagcgtaatattagtatgggggcggcttacctgaatattctggaaaccggcccgctggcaggcattgaagatccgaaggtactgcaatatgcgctggtggtgagttacgctaacggggcaggtgcgctgctacggactttcagcagtgatcggaaaaaggcgatcagcaaaatcaacgatttggatgctgacgagttcctcgaacacgtagcgcgaaatcaccctgcgccgcaggctccgcgctatatctacaaacttgagcaggcactggacgcgatgtaaatcagtcgcgcactttgtccgctttttcccgggcttctcgctcgagagagaaaataatccgctgtaattgccgctccaccgtcgggctgacgttaagaaaacggaagctcagacggggagtggtgatggtttcattcttgccatcaatcactttgcgctcgctgatggagattaactgggcgtcaaagtgaaaaacaccccattgccccatgttgacttcaatctgagcgaagcgcatgccttcttgtaattcggcaggctttgctgtttccagtaatgcgcccatgccgcctaagctcaaatcatacaggcggaaacgtaacgtactgttatccgccagtttggtctggcaaaaataaggcggatggagtggggcggagatgcggaaatatcggcgtcgttgtacaaaccataaggtgggaggcggtacggtaataaatgccggaagctgcaagtattcactctgctgtagttgttcaacagtaaactcgactttcgcaccctgagtttcggcggtaatggtaatgtgctgtgcctttagcacggcgatgttgtcttcggcttgactgccgaaatccagcaccagtttatccggggttattgccagtaatttgctgatcagctgcccgccattccaactgagacgcaaaggaattgcggctttgtgcaaatcgcgtaacacgcccaggacggctaacggattttgtttcaggaactgctcatggtaatgactcacgcggaaaaactcctgactgacaaactgtctttggtttatcggtcacagttaacaaaacttaatacaaatgcgtgaatattttttacatgttgttcttaaatcagccgacatacgcccagcatcgatcccgcccttgcctatacttagagcgttgatgtaagcatttcttgcgtccgattcatcgaaacgagggcctgaacatgggaattattgcctggattatttttgacctgatagccggcattatcgccaagctaatcatgccggggcgtgatggtggtggatttttcctgacctgtattctcgggatagtcggtgcggtggtcggcggctggctggcgaccatgtttggcattggcggctccatcagtggttttaatctgcacagcttcctggtggcggtggtgggagctattctcgttctgggcatattccgcctcctgcgaagagaataagattttcataaggcggatagcgatacagatgccgctatccgctttcacatcagaacgtatactcgacacctgctttacgggtgaaaaaaatcaatatagcacttcgatatccgataaagtcggttcccggtaacaacaacagaatccttttttaattattgtttcgttgtttttggtgtgattcagaaaataaatattttagacagtagccagagtggcgttaaaaatggggcggatagtgaggcggttttggctgcgcttattgaacatttagaattgatcaatccttctggcagattaagccaaaatacccgtagcgcaatgcttcagttacgcgaagaggaatggtctgaattctttttttggttgctaaattctctggagtgtctggattatgtgattattaatttaactccagaaagcaaaaaaacgttgatgagtgaacaccgtaacaatattcaggtagcaattgatgctttatatagccaacgtcggcgtaaaagcccgggtgatgaaagtgaaacacttacccgtagaaatgacgctatcttcggcaaccacgtatggcaaacatttgcgcaatacttcccgccaggacttgaaaaaccgtctgtgtaaaaaaaaccatagctatggtgttatctgccgacaacgccatccggagaagccgaatgacgttgtcggagtaagcgctggttaaggtgtgggttgtgcctctttggtactgggttgcgtcgttgcactcttaacggtcggacgcgtcgccggaacattgtcacacggttgctctttcgggcagatcaaatccagcattttcagcgtcacgccattggtccagccaaagccatcctgtaatggatattcgccaccgccgccccccgttccggtggtgctgacatcatatttttccaccagctttttctcccggtcataggtgtgctgaacattggtcaggaagtgccagctaatgtccatcgccacctctttttgcccgtagttttgtaatccttctgtcgcgacccactgtaacggtgcccagccatttggcgcatcccattgttgcccacttttcacgctcgtggtgttcaggccgccgggttgcagcagatgtgttttcgtcgccgtcgccattttgttggcgcgatctttcgctgccgcattgacgtacagcgggaacagggcggccgcggttaactgattgcgcactttatgacttttcaggtcgtaatcggcataccagccttgttgatcgttccacaggtatttttcgatccctttttgacgggcatttgccagcgtttcgtactggtttgccatcgcgttatctccggcagctttgctggcgcgggcgaggattttttccattttaaacatcaggctgttcagatcgaccggtacgatgctggtggtgcgtaaggtatttaactgctgcgggttgtccatccagcggctgctgaaatcccagccagacgcagcggcagagcgcaggtcgcggtaaatttcagtggcaggtcgattcggattgcttttggcggtggcaatatcttccacccaactctctggtcgtggcgtatcgcgatcgtcccagtagcggttgagaagggtaccatcctgaagtttgacaacgcgtttttcctgttgtccggcttgcaggttttcaacaccgtccatccagtaagcatattctttttgcatttgcggcaggtattgcttcaacgcggcatcgccttcatgctgcgccagtaactctaccatcagggcaaagaagggcggttggctgcggcttaaatagtaactgcggttgccgttgggaatatgaccgtaagtgtctatttcatgagcaaaattggccaccatatccgcgactttatcccagtgaccgctttcggcaagtcctaacatggtgaagtaactgtcccagtaatatacctcgcgaaagcgtccgcccggcacgacataaggttccggcagcggtaacagagaatcccatttttcggtgttttcggtagaacgcgttaataccggccaaagtccgtcaatatgttcgcgcagactctgcccctctggcggaacatatttctcgccttctttcggcagggtgaaattgacgttaacgaaatggcgcagatcaaatccgctctggttttgctgcatccgataatcagcaaggatcatcagcggatcgctgttcggcacggcatcggcaaaggttttttggtccggaaaaagtttggcgttttgcacatcattaaacagcggccctaataaaatatcaggcggctgtggtgttaccggtgtttcttctgcctgcacgcttagcgcagcgaaacacaaaaagatacaggctggaattaacgccattttttgcgggcgagaaggtgcgggggatttcatcaatcattctcctttggcgaaaccgaataaaacggtattcaagtatcagaaaaccttagttcaggatcgcactagctgcatgatcgaaatctcattctgcgaactgtcaggcattttagaaaagggaattaaagggataaataacggcgaaatagagtgatcaaataacgtctgtttattagccagccagcggcgttgggttcgtgattagcgaagaaaaatcatcataaattggtgaaaaatataacaggtagttaaaaaccattagtgctgagtaaattgccggatgacatcagaacgatgccatccgaacagtggcttaaccctgacggttgaaacgttgcgttttaacgtccagcgttagcgtttcttctggttgtatcgcatacagtttctcaccctgctggcaaatccagccaatccccagttcacgggcgattagggcgctgtgggataccggacttccggcgctaaggcagataccttttacaaccgccggatccagttgcagtactgtggaaggataaatgttctccgccagtagaatagttgggctgttaaactgcgggagttcttctttcgtttgggtcaggtggaccagggtgcgatgcagaagatcgtccacatcaatatagcgagcttgtagatattcatcatccagttgctggtattgctggctaagttctttaagaacttgctgccaggcatattctgccgtgcaatgttcatgctgaaggagttcgcttgccgccgccagcagttccggatcatctaacagtgtatggtgaccagaaaagattgcggcaatatcgtcaagcccgctggcttctgctttcgctgttaacgtcatcagatctaataacgtgaagtcaatagcctggcgtaatcgatcttgttcttcttccacggtcagggtactttttgcctgtaccgtacataaaactggttgataataaaaggctttaccgctaacaggcggaacgggacgcagagtaggtggagcgacttcctccgtttcaccaaagttatcttcagccagctgacggaaagcgatcagtgcctcttcagcttctggccctttcgcaatcaggcgcagcgtatcgttatagcgaacttgtagtaacgcaatctggttaatactctctggtgtgacgcatttgccgtttttttccagcaacatatcggcattaaatgtgcttaaggtataaaccagccgggaggccggacgtacatgcaggccgttacggttttttatgaccaccgccagagaacgggcttcttcatcgtacgcaggacatgtgtcagagatttcagtgtcggaggacggtaaacccagttgttcacgtttggcttccagcgcatgcatggcgtcaaagataactttgtcgatatccgccccgctggccgcgctgaccgttgctgccagtgtaccttcgaccaacggcgcagcacacaaacgtacttttgcggcgatctcgggagccagcaattccagcgcagtttcagcactcaataatgcgctacccatatccatcatgaccagcacatggtcggcatcagcaacagattcgatggcctccatcactttgacggcatcggtaccaatgggattttgtggatcgtcaattcccgcggcaatggcgattttacaactatcactcattaacatctgacgggctaattcaccgacaccttctcccagtcggctgctatgactaactatgaccaggtttaccatcaccaattccttactcttttgcggctaacgccaacatttgcatcataaacatcacgctggtcgcgccgggatcctggtgaccaatactgcgttcaccgagataactggcgcggcctttgcgggcttgcatcgtaatcgtactttgtgcagcggattcggcgatgctactggcagcttcgagcgccaccggaacagagagattttgctcgctggactgacgtaagctttccaccaccggcacccacacatcacacatggttttatcgccaggttcggctttcccgcgactgattacgccgtccgcgccatcgcggaacatctgataaagctcttccagtgtcaggctttgccgtgcctgggtcgcctgtgcggcgcggataaagaaggtaccgaacagcggaccactggcaccaccgacgctggaaagcagcgtcataccggtattcttgagaatgaaaccgatatctttatctgcgatagcagggagtttttccaccactttgctaaagcctcggttcatatttagcccgtggtcagcatcgccaatttcgcgatccagtccggtaagatactcgctctcggtgctgaaaatatcgccacaacgagtgagccagttaacaatttgagttctgctcagactcattgctttctccttatttaccccagttaagggccggggtgtggaccggggcgtcccagagtgccagcgtttcgtcatcaactttcagtaaggtgatactgaaaccggtcatatccagactggtgcagtacgcgccaattaaattacgttcgatagtcaatcccgcttgctggcaacgtgtggtcaggcggttatagacgccgtacagctcagaaagcggagttgcgccaagattgttaaccagcgcaatcacccgatcgccagactggagcggttgtttggtttgttgttcttcctgccaactgccttgttgataatcccagaaacgcaaagtgcgatggtaactgccatttaccagcagggtgtcgaacatttcatcgacggtttgatcaagggaagagaaggggcggcggtcaatacccggctcaccatgaatgccgacgccaaactccatctcattatccgccagggtaaaagaaggtttgcccgcggcaggaacggtacaggcaccgagagcgatacctatactgtggccttgattattcagcttacgccccagttccgcacaggcgtccagactgtcgccacgctccgccgctgcgcctacgagtttttcaattaatacggtgttggcaacgccgcgtcgcccggcagtataaagactgtcttttaccgcaacgtcgtcatcaatgaccacagtggtcacttttacgccgctatcgtgcagtaactcggtcgctgtttcaaagttaagaatatcgccggtgtaatttttgataatcaacagtacaccttcgccgccatcaacttgcatggcgcattcaaagattttatcgggcgtcggactggtgaaaatttcgcccggacaggccccgctaagcatcccctgaccgatataaccacagtgcatcggctcgtgtccgctgccgccaccgctcagcagggcgacttttcctgcaacaggggcatcagctcgggtgacatacaccggatcctgatgcagtgtcaggcttggatgcgctttcgccagtcctgccagttgttcgtccagtacgtcttgcacatcattgatcaattttttcattattttgctccagcaattacggtagggcatggatgatgttcaacgacacggcgaccactgactgccgatgaatccattgtgcatcaggcaagggaaaagaaaattagcccaaattatgtttcatagtgaaacatatgctttaatgaatgttccatattgaaacttttacgtgtattaatacttaaaattgcgagccggaacaccttttgtcataagggatgcgggatatgagtggcgcttttaacaacgatggtcggggcatatctcccttaattgcaacctcctgggagcgatgcaataagctgatgaaacgggagacatggaacgtaccacatcaggcccagggcgtgacatttgcttctatttatcggcgtaagaaagcgatgctgacgctcgggcaggctgcgctggaagatgcctgggaatatatggcaccgcgagagtgtgcgctgtttatcctcgatgaaaccgcctgcattctcagccgtaatggcgatccgcaaaccttgcagcagctaagtgcactgggattcaatgacggcacgtattgcgccgagggaattattggtacttgtgcgctaagcttagcggctatctctggtcaggccgtgaaaacgatggccgatcaacatttcaaacaggtactctggaactgggccttttgtgcaacgccgttgtttgacagcaagggccgattgacgggaacaatagcgctggcgtgtccggttgagcaaactaccgcagctgatttgccgttgacgttggcaatcgcccgcgaggtcggaaatttactgctgacggacagtttgctcgctgaaactaaccgtcatttaaatcaacttaatgccctgttagaaagtatggatgatggcgtgattagctgggacgagcagggtaatttgcaatttattaatgcccaggcggcgcgggtcttgcgccttgacgcgacggcaagtcagggacgggcaatcactgaactcttaacgttacccgccgtattgcaacaagcaataaaacaggcacatccgctcaaacacgtagaagcaacctttgaaagccagcaccagtttattgatgcggtgataacccttaaaccgataatagaaacgcagggaaccagctttattttgttgctccatcctgtggaacagatgcggcagttgatgaccagtcaattaggaaaagtcagccataccttcgctcatatgccacaggacgatccgcaaacccgccgcttgattcattttggtcgccaggcggcgcgcagtagctttcctgtcctgctttgtggagaagagggcgtgggcaaggcactgctaagtcaggcaattcataatgaaagcgagcgtgctgcaggtccttatatcgccgtcaattgtgagttatatggtgatgctgcgctggcggaagaatttattggtggcgatcgcacggacaatgaaaatggccgtctgagtcggctggaactggcacacggcggcacgctgtttcttgaaaagattgaatatctggcggtggagttacagtctgctttgcttcaggttatcaagcagggggttatcacgcgactggatgcgcggcgtttaataccaattgatgtcaaagtgattgcaacaacgaccgcggacctcgcaatgctggtggaacaaaatcgttttagtcgccagctgtattacgcgctgcatgcatttgaaattaccatcccgcctctgcgtatgcggcgtggcagcattccggcgctggtgaataacaaattacgcagtcttgaaaaacgcttctctacgcggctgaaaattgatgacgatgccctcgctcgcctggtttcttgtgcatggccaggcaacgattttgaactttacagcgtcatcgagaatcttgctctgagtagtgataacgggcgcattcgcgtcagtgatttgccggaacatctgtttaccgagcaggcgacagatgatgtcagcgccacccgcctttccaccagtctgagttttgcggaagttgaaaaagaggcaattattaacgcagcccaggtcacaggcggtcgcattcaggaaatgagcgctttacttgggatcggccgcactacgctgtggcggaaaatgaagcaacatggcattgatgcagggcagtttaagcgccgggtatgaaagacagaaacgatttctgatacatcagagtgatctgtatttcattccggcgcacgctaacaattttcagcatcgtttaagggcttgtctatcccgcacttaaaagctgaagcgatatcctccgttgacttgcttctgatcaaagaggttaccctgcgtgtaatccgcttcgagatagaatgtgtgctgtttgttatactgtgcactgactcccacgccgttattccagccattacctttgaaactgtacttctcccgggagttgttcaacagatattcggtatccccactaaactcgcggatagcgccagtcttcacatagacattcagctggctgttgcctgcggtgatgtcataccccagtatcatgctggcacgccccagcaggctttcgtagtgattcagatgtatattgaggccattactcgccttcatagtcatctcattctggtggctgtatgtaagctgggtttgcggctctatatagaacccataaccagtaggggacaggttgaacctctgcccggcttccagggagatgctcattccattcgcagtgccgttggcgttaacgccgttgttctgactgtccagtacgtggaaactatttttctggcggcttgcttttataacgagatcgctgtaaaaaccgttttgtgccatgtaactggcgtacattcccatgtagtcactacgtgcggtaccgtcgcctccgctatagtccgggcttgcatgtgtactgccaatatacagaccgacatacaacggcattacatcagagagacgtttatccccaccaaactggataccgctgtaacccatgtcaaagccgctcagtttgccactggcaaaggagtccaggcttcccccataactgcgcaaccagatattaccgtctttactctgatttcgcaggtcacccatccgttgcatcagcgtacggttttcaacatagttcaataagtaaccgacattgagataattgccgccagcatctgcggtcgtggtgggtttaggcgtgggagcgggttcaggcgtaggatcggggttgactatgggaggctgagcgggagctggtgtgggttcaggattaggagtcggttccggaactgtcccggaagcgtaaagctcccagttagtgccatttttacgcacatcgtacagatatccccccaactcaacctgagaagacgcgctgaagctggccgcgccgtcagtggtttttaccactgtcagaacttcatttcccgttgtggcctcgctgccctggttgcggatagccaatacgtgattaccagcactactcccgctgatattcaataaatcccctttattattaacgccattaccctcgccaacaacatcagcacgcataataaaggtactgttaccgctcaggttctctacgtttaatgtggcaaatgtgccggcagtactcccgtggctggcaaaatcgacagtactatggctcagcgccagcgtgtcgagattagaattacttgttacgttccagacgctgttattcattgcaacgtccagttttccgccattgacattatcgctgagggaggaacctgtccaaacgctcccagggtgcatatccagattgattagcccacctttggaaagaacgctaccgttgataagcatacgaccgctggcgttgatgcggctggcggcataaccatcgtcatgttgcgttgcgatggccatctggtcgggtgtactcatatcaatgaccagatcgctcgtgaggtcgatctggctgttggtcatggcataaattcccctggctcctgccgcgccggtgatagccaaactgtctccggttattctaccgccgctgagagcccacaaacccagcgccagactgccattacgatcaactgtaatatcggtattttgcatgttgacaacagccgttgccgtctgggcgctggcaccataagaaccgccggaaaagatgctgtttcgttgcgctgccgtgccagtaaaattgattatcgcgtcactaccactggtgacgaggccaccgccctgcgcggaagaaatatggctatctgcaccgatagtggttgtaccaccacgaacttcgacgccattggccgcggctccagttacatcaacagtgagtgcattcgcgctaacctggccaaagctccagaggccgtgagcattatcgccattggttttaatggtactgtttgttccgagatcgacaacagagtttttctgtacgtttatccccatggcgctgtagccctgaacatcgattgtcaggtctgtagccgtaaaacgcgcagcaccattggcgttattgccgttgagaccaccgatataaacacctgtacttccatcggtcgtgattttacttccgcttccaagatcgacactggtgccatagtcattgatggttaggcctataccgttgctgttttcaatggtgaattgagtggctgttagtgtactgctatgcccaataatgatgccgtcatcgttactcttaatggtgctgcctgtgcctaagtcagcatgggtatagtcaccaattaagttaatgccgatggcagaggtttgaccaacaacatctactgtgagtcggttagctgtcagggagctgtttttgccctgaataatgattccttttgcatatccagaggcgtcgttgacattgacggtgacatcattacccaggttgatattgccaggcgtgtttcctgctggggtcattacaccatagaggtttccacttggatcggcggtatctcctgtaattctgtcaccatcattaatagtaatattggtgccatattgacttcctgtatcagcagctatcagcaggggggaaaagataattgcattcaaaccaatagcgccaaattttatcagttgaatactggggctacggatttttaattcagcgagacgatctgctttggtattcccattgtgttgtttgatgcccataccactcctatatagtacccagactatgggtctatggattttgtcattttgtttaaatcaatgaataatatcctcttatcatcatgatatttgtatggtgcaatcatgatgagcttctcagagaataattctctattaccgggcaaaatcaggaacacaggaattaatatatatttaacatcccccttacaaaggtgagtttatatcgagttattccctaagttgtcgttacttattccaattcgttactataaatatggcaaaaatattacaacaaacagcggttaaaaaatttggtgaagattttttgtaataatcctaattagttatgggaatttcgcttgatgtatctgcataacaaaaacaatatgcgccatttttgcattactaataagaaaaagcaaaaaacatcgatattcatttttggtcaatgggttttctggcctatcgttgttattgtgctactggttatcattttcatcttgccagcatattggagcgtgatcaattttgatcagctgtgaagggggctgatgtgtagtgatacaaaaacttacgttatatcactgctaatgagatatccggcatctgaacacttatgtctttaattattctcgtggttcactataggcaataagcacaaaagtgtaggatgttacaagaatgattaggactcggtgaaatgaaaaatccacgcaattgcgtggattttatatacttttgcgctcttcatgagatttagcgaaacctcatgagacaataaattaattagacgttgaaaaggaagttcatcacatcgccatctttcacgatgtaatctttaccttctgcacgcattttgcctgcttctttcgcgccttgttcacctttgtaagtgatgaaatcttcaaagctgatggtttgtgcacggataaagcctttttcaaaatcagtatggattttgcccgctgcctgcggcgcggttgctccaaccggaatggtccatgcacgcacttctttcaccccagcggtgaagtaagtttgcaggttcagcagtttataaccggcacggatcacacggttcaggcccggctcttccagcccaagctcctgcataaactcgtcacgttcttcgtcgtccagttcggcaatgtctgcttcaacagcagcacaaaccggaaccacaacagaaccttctttcgccgcgatttcacgcacctggtcaagatatgggttgttttcaaaaccgtcttcgttgacgttggcgatgtacattgttggtttcagcgtcaggaagctcaggtaacgaatagccgctttctcttcagcgcttaaatccagcgcgcgcagcatacctgcattttccaactggggcaggcatttttccaggaccgccagctcagctttcgcgtctttatcgccacctttggctttcttctgtacgcgatgaatcgcacgttcgcaggtgtcgaggtctgccagcgccagttcggtgttgataacttcaatatcgtcagccgggttaactttgccggaaacgtgaatgatgttgtcattttcaaagcagcgaacaacgtgaccgatcgcttcggtttcacggatgttggtcaggaactggttacccagaccttcgcctttgcttgcgccttttaccagaccggcgatatcgacaaattccatggtcgtgggaagcgtacgctgcggttttacgatttcagccagttgatccaggcgaggatcaggcattggtacgacgcctgtgttcggctcaatggtgcagaatggaaagttggccgcttcaataccggctttggtcagcgcgttgaacagggtagatttcccgacgttgggcaaaccgacgataccgcatttgaatcccatgatttaaatcaccttaatatcttaataatcaacctgttattgctaacagattgcagaaatggaaataactttgcctattatacacggcactcggcaaaaatgccgcagacaacgacttattgcgctttaaaggcgtgcaatcggttcgttgctttggtcaagccatctgtaaaccacatttcagtacaacgcgccgcttcgtcaatggcttcatcaattaacttctgttcactaacaggcggtttgcctaacacaaaaccgacaactttatttttatcgcccggatgaccgattccgatgcgtaaacggtgaaagttagggttattacccaatttactgatgatgtctttcagtccattgtgaccaccatggccaccgcccaatttaaatttggcgacgccaggaggcagatccagttcgtcgtgggccaccagaatttcgtccggattaatgcggaaaaaactggccatcgccgcaacggctttgccgctgagattcataaatgtagtcgggactaacaggcggacatcttcgcctccaagagtgactcggctagtataaccaaagaatttagcctcttcgcgcagcggagcgcgcaaacgctctgccagtaagtcaacgaaccaggcaccagcattatgtcgcgttgcggcgtattcagcaccggggttcgccaggccgacaatcaatttaatcgtcacgtttttttgtcctgagtgtgtacataactggcgcgtagtttactggttgcggccccgcttgacaaaaaactgcgtatcaaatgcagataacgtaataattgcctgagtggactattagaaagtcaaggtgttcaggcgtttatttgtaaagttttgttgaaataagggttgtaattgtgatcacgcccgcacataacccactgggtgttgtctatactttacacataaggaagaggggtattccctgttacaacccagaaagttccggaggtgacatatgaaacgcaaaaacgctagcttactcggtaacgtgctcatggggttgggtctggtggtaatggtggtcggcgtggggtatagtatcctcaaccagttaccacagtttaatatgccccagtatttcgcacatggtgcagtgctaagtattttcgtcggtgccattctctggctggcgggtgcccgtgttggcgggcatgaacaggtgtgcgaccgttactggtgggttcgccactatgacaaacgttgccgccgtagcgataatcgccgtcatagctaacaaataatgcagtttgctgaccagtcagtttgcgctgactggtcaatctcgtacttataaatccgccatcgccgcgcgacgattcgggaagaacgccaggcgtcccgggatcggttgaatgccagcgcgagccatagtgcgcagtggctggaattccacgttgcacacgcgcagttcacatccctcgggcagacgcttcacaaaacgctggaacgcatcaagaccaccagcatcaagtaccggaacggcatcccacttcagaatcacaatccgtttgccttcaagacgactctccaggtccgtgaataagccttcagcagcagcaaaaaacagcgggccaataacgcgcagaaccaggacatcgtctggaacatctacgactaccggtgccaggcgagtcatacgtgcgatacgacgcataaacagcaggcttgccagcacgatccccacgctgatggcaataaccatatcaaacaacacggtcaggctcatgcacagcagcatgacgatgatgtcatctttcggcgcatgacgcagcaagtcgaccactttgtgcgcttcactcatgttccacgccaccatcaacagcagggctgccatggcggaaagcggcagccaggagagcagcggtgccagtaccagcagggcaagaataaccagaatagagtggatcaccgcgctgataggggacgttgccccggcacggacgttagcggcagaacgcgcgatggcagctgtagcggtaataccaccaaagaacggagcgataatattccccagtccctgtccaaccagttcgctgttcgccttgtgtttcgtcccggtcataccatccagcaccacggcgcagagcagagattcgattgcgccgagcattgccatactgaatgccgcaggcagcagtgtgcgaatagaatcccaggttagcgtgaattcactattaggcagatcccacggcagcaccagttgcggcagcagttgcggaataccgttaccctgagaaccatcggccaggacgtagtggaattggctaccgatggtagcaacatgtccgccgagcaggttaacaatccccatcaccgcgcaaccagccagcaaggccggaaggtgaccgggtaaacgaatgcccagacgcggccaaaaaacaagaatacctagcgtcacaatgccaatggcagcatcacccacattaatggtcggcagcgccataaataatgcgccgactttttgtagataatgttccgggacatgggccatttgcagaccgagaaaatctttaatctgcatggtaccgatggtgatcccgataccgctggtgaaacctaaggtgacggaaaccggaatatactcaatcaggcgaccaaagcgtgccagacccatcagaatcaaaaagatcccgctcagcaaggtcgcaaccagcagtcctgccagtccaaactgttggctcacgggatagagaattaccacaaatgccgcagtcggaccggaaacgctaaagcgactcccacccgtcagagcaatgacaatccccgcaacagctgcggtatataaaccgtactggggtgccacaccactaccaatagccaacgccatcgccagcgggatagcaataatcccgacggttatcccggcaatcaggtcacgggtaaaccgtgcggcagtatatttttctttccagcaagcgtcgatcagagcgcggaaaggcatcacatgactggaaaatattttgttcacaataatgtttcatccgtgagcgcatcatctgtcaactaaatggcaggtgaaggaggcataggtcatacaaatggatattacagacaaaaaaacccgccgcagcgggtctttgagccgggttcgattagtgttcgaacatggcagagatgctttcttcgttgctgatacgacgaatcgcttcggccagcataccactcagggtcagagtacgcacgttcggcagacttttgatttcatcgctcagcggaatggtatcgcagacaacgacttcatcaattacagagttacgcaggttgttcgccgcgttgccagagaagatcgggtgagtcgcgtacgcaaatacacgtttagcaccacgttctttcagagcttcagcagctttacacagcgtaccgccagtgtcgatcatatcatcgaccagtacgcagtcacgacctgcaacgtcaccgatgatatgcatcacctgactaacgttcgcacgcggacgacgtttgtcgatgattgccatatcggtatcgttcagcagcttagcgatagcgcgggcacgcacaacgccgccgatgtccggagaaaccacaattgggttatccagattcagctgcagcatgtcttccagcaggatcgggctaccaaatacgttatcaaccggaacgtcgaagaaaccctgaatctgttcagcgtgcagatccactgtcagcacacggtcaacaccgacgctggagaggaagtctgcaaccactttcgcagtgattggtacacgagcggaacggacgcgacggtcctggcgcgcatagccaaagtaggggataacagcggtgatacgacctgcggaagcacgacgcagggcatcaaccataacgactaattccatcaggttgtcgttagtaggggcacaagtggactggatgatgaaaatatcaccaccgcgtacattttcattaatttgtacgctgacttcgccatcgctaaagcgacctacagcggcgtcgccgagactagtgtacaggcggttggcaatacgttgtgctagttccggggtggcgttaccagcaaaaagcttcatatcaggcacgagaagaacctcaggcatgcgtccattggtggaaagaatctgccgaaaactgtgcgggccaggcatgatcctttccaggcggtgtattaaagagcgcgatgcaacgtctggaacaaggtgacgttgtcaccgaaactcagcttgcccggcttaaagcatggctctgtgcaatggggaaagattagcgcctttcgccacaaagccattgagccattccggggcttgctctagcacctggcgggcttcagactctgtatcaaattcagcaaagacacaggcccctgtcccagtcaggcggctcggggcgtattctaacagccaggaaagcaccgcatcaacctcgcgaaaacgttttcttgcgataacctcgcaatcattgctgaattcacattttagcaacgtttctatactcctttttggcgtattgcgcgggagttcaggatctttaaaaatcaccggagtcggaatacttacaccagggtgcgccaccagataccacttctctggcggatccaccggcgttagtatttcaccaacgccttcggcaaacgcggcatgcccccgaacaaagacaggaacatctgcgcccagcgtcagccccatttccgccagctcatccatgcttagcccgcattgccagagatgatttaatgccaccaggaccgtcgcggcattggaactaccaccgccgagaccgccgcccatcggcaaacgcttgtcaatgctgatattcgcaccgcttcccgtcggaagacgcccgctgtctgccgcagttttcatcaacaatcgcgctgcgcgaacgatcaggttatcttcatgttccacgccttcaacgggcgttaacagacgaatatccccatcgtcacgaagctcaatgctgatggtgtcgccgtaatcaagaaactgaaacagcgtttgcagcgtgtggtaaccatccgcacgctgaccggtaatgtataaaaacagattaagttttgccggagagggccactgtgtccgcattatttcactatccagttatccatttttaacttgatgcgttgaccaccgtcggtgagttccatattggctggcatcgcaggttgcgttttggtgtcataaccaccataaacaaccttccagtttttgccattctggctgtaggtaatttcgctcaggcggtactggtcgtccagtttgtagtcggttgcatcacccggtaaacctaaaatccactggcgcaagctgttgagcggaattggcattccggtcaatttgccaatcatctcttcggcgtcatcggcggtataacgctgacctttattgtcgactaactgcacgttacccggttgagcattcagctccagttccgtgctgcccaatgggttagtgagcagcagacggtagcgatcctggccggtttgctgccagaaaaagcgggcgtacactttttgttggtcagaaatataagcgaacgcgccgcgagtctgatactgattaagattgcgcacgtcttgctgatgctgacgccattgtgggctatccgggcttttgccaggacctttgggcgtggtaacggaacaggcagtgagcacaagagcagccagcggtagcaggcggataagacgaaaatcgggcaggggcatagtgatgacaagtccttgagatacgttgcagttataacccttaatgctagcgttaccgtccgctatcgtctatgttcaagttgtcttaattgccagaatctaacggctttcggcaattactccaaaagggggcgctctcttttattgatcttacgcatcctgtatgatgcaagcagactaaccctatcaacgttggtattatttcccgcagacatgacccttttagcactcggtatcaaccataaaacggcacctgtaagcctgcgagaacgtgtaagctttagcccggataagctcgatcaggcgcttgacagcctgcttgcgcagccgatggtgcagggcggcgtggtgctgagcacgtgcaaccgcacggaactttatcttagcgttgaagagcaggacaacctgcaagaggcgttaatccgctggctttgcgattatcacaatcttaatgaagaagatctgcgtaaaagcctctactggcatcaggataacgacgcggttagccatttaatgcgtgttgccagcggcctggatagtctggttctgggggagccgcagatcctcggtcaggttaaaaaagcgtttgccgatagccaaaaaggtcatatgaaggccagcgaactggaacgcatgttccagaaatctttctctgtcgcgaaacgcgttcgcactgaaacagatatcggtgccagcgctgtgtctgtcgcttttgcggcttgtacgctggcgcggcagatctttgaaagcctctctacggtcacagtgttgctggtaggcgcgggcgaaactatcgagctggtggcgcgtcatctgcgcgaacacaaagtacagaagatgattatcgccaaccgcactcgcgaacgtgcccaaattctggcagatgaagtcggcgcggaagtgattgccctgagtgatatcgacgaacgtctgcgcgaagccgatatcatcatcagttccaccgccagcccgttaccgattatcgggaaaggcatggtggagcgcgcattaaaaagccgtcgcaaccaaccaatgctgttggtggatattgccgttccgcgcgatgttgagccggaagttggcaaactggcgaatgcttatctttatagcgttgatgatctgcaaagcatcattagccacaacctggcgcagcgtaaagccgcagcggttgaggcggaaactattgtcgctcaggaaaccagcgaatttatggcgtggctgcgagcacaaagcgccagcgaaaccattcgcgagtatcgcagccaggcagagcaagttcgcgatgagttaaccgccaaagcgttagcggcccttgagcagggcggcgacgcgcaagccattatgcaggatctggcatggaaactgactaaccgcttgatccatgcgccaacgaaaagtcttcaacaggccgcccgtgacggggataacgaacgcctgaatattctgcgcgacagcctcgggctggagtaacagtacatcattttctttttttacagggtgcatttacgcctatgaagccttctatcgttgccaaactggaagccctgcatgaacgccatgaagaagttcaggcgttgctgggtgacgcgcaaactatcgccgaccaggaacgttttcgcgcattaagtcgcgaatatgcgcagttaagtgatgttagccgctgttttaccgactggcaacaggttcaggaagatatcgaaaccgcacagatgatgctcgatgatcctgaaatgcgtgagatggcgcaggatgaactgcgcgaagctaaagaaaaaagcgagcaactggaacagcaattacaggttctgttactgccaaaagatcctgatgacgaacgtaacgccttcctcgaagtccgagccggaaccggcggcgacgaagcggcgctgttcgcgggcgatctgttccgtatgtacagccgttatgccgaagcccgccgctggcgggtagaaatcatgagcgccagcgagggtgaacatggtggttataaagagatcatcgccaaaattagcggtgatggtgtgtatggtcgtctgaaatttgaatccggcggtcatcgcgtgcaacgtgttcctgctacggaaagccagggtcgtattcatacttctgcttgtaccgttgcggtaatgccagaactgcctgacgcagaactgccggacatcaacccagcagatttacgcattgatactttccgcagcagtggggcgggtggtcagcacgttaacaccaccgatagcgcaattcgtattactcacttgccgaccgggattgttgttgaatgtcaggacgaacgtagtcaacataaaaacaaagctaaagcactttctgttctcggtgctcgcatccacgctgctgaaatggcaaaacgccaacaggccgaagcgtctacccgtcgtaacctgctggggagtggcgatcgcagcgaccgtaaccgtacttacaacttcccgcaggggcgcgttaccgatcaccgcatcaacctgacgctctaccgcctggatgaagtgatggaaggtaagctggatatgctgattgaaccgattatccaggaacatcaggccgaccaactggcggcgttgtccgagcaggaataatggaatatcaacactggttacgtgaagcaataagccaacttcaggcgagcgaaagcccgcggcgtgatgctgaaatcctgctggagcatgttaccggcagagggcgtacttttattctcgcctttggtgaaacgcagctgactgacgaacaatgtcagcaacttgatgcgctactgacacgtcgtcgcgatggtgaacccattgctcatttaaccggggtgcgagaattctggagcttgccgttatttgttagcccagcgaccttaattccgcgcccggatacggagtgtctggtggagcaggcactggcgcggttgcctgaacaaccttgccgtattctcgatctcgggacgggtaccggggcgattgcgcttgcgctggctagcgagcgcccggactgcgaaattatcgctgtagatcgtatgcctgatgctgtctccctggcacaacgtaatgcccagcatctggcgatcaaaaatatccacattctgcaaagcgactggtttagcgcgctagccgggcagcagtttgcgatgattgtcagcaatccgccgtatattgacgagcaggaccctcatcttcaacaaggcgatgtccgctttgagccgctcactgcgctggttgcggcagacagtggaatggcagacatcgtgcatatcatcgaacagagccgtaacgcgctggtatccggcggctttctgcttctggaacatggctggcagcagggcgaagcggtgcgacaagcatttatcctcgcggggtatcatgacgtcgaaacctgccgtgactatggtgataacgagcgcgtaacgctcggccgctattatcaatgacaagtttttctacactgcttagtgttcatcttattagtatcgcgctttctgttgggctattaaccttacgtttctggctacgttatcagaagcatccacaggcatttgctcgctggacgcgcattgtgccgccggttgtcgatacgctgttactgttaagcggcattgcgttgatggctaaagcgcacatcctgccattttccgggcaggcacagtggctgactgaaaagctgtttggagttatcatttatatcgttttgggttttattgcactcgattatcgtcgtatgcacagtcagcaggcgcgcattattgccttcccgctggcgttggtggtgctgtacatcatcattaaactcgccaccacaaaagtaccgttactggggtaagtcatgagaagcttagctgatttcgaatttaataaagcgccattgtgcgaaggcatgatcctggcttgcgaagcaatccgccgcgattttcccagccaagatgtttacgacgaactggagcgtctcgttagtctggcgaaggaagaaatcagccagcttctgcctttagaagagcagttggaaaaactgatcgcgctgttttacggcgactggggatttaaagccagtcgcggtgtttatcgtctttccgatgcattatggctggaccaggtgttaaagaatcgacagggcagtgcggtaagtttaggtgcggttttattatgggtcgcgaatcgtctcgatttgccgctgctgccggtgattttccctacgcagctgatattgcgcattgaatgtccggatggcgaaatttggctgattaatccttttaacggtgaaagcttaagcgaacatatgctggacgtatggttaaagggaaatatcagcccgagcgcggaactgttttatgaagaccttgatgaagctgataacattgaggtaatccgcaaattgctggatacactcaaagccagcttgatggaagaaaatcagatggagctggcgttacgcaccagcgaagctttattacaattcaaccctgaagatccctatgaaattcgcgatcgcgggttgatttatgcgcaactggattgcgaacacgttgcgttgaacgatttaagttatttcgttgaacagtgtccggaagacccgatcagcgaaatgatccgtgcgcaaataaataacatcgcgcataaacatattgtgctgcattaattaatcgacattttactcaagattaaggcgatcctatgaaacaaaaagtggttagcattggcgacatcaacgtagcaaatgacctgccgttcgtactgtttggcggtatgaacgtgttggaatctcgcgatctggcgatgcgcatttgcgagcactacgtaactgtgacccagaaactgggtatcccttacgtgttcaaagcctcttttgacaaagccaaccgctcctccatccactcttatcgtggaccgggcctggaagaagggatgaaaatcttccaggagttgaagcagacttttggcgtgaaaattatcaccgacgttcacgaaccaagtcaggcacagcccgttgctgatgtcgtggatgtgattcagttgccggcgtttcttgctcgccagactgacctggttgaagccatggcgaaaaccggtgcggtaattaacgtcaagaaaccacagtttgtcagcccgggacagatgggtaatatcgttgataaattcaaagaaggcggcaacgaaaaagtgattctttgcgatcgcggtgctaacttcggctatgacaacctggttgtcgatatgctgggcttcagcattatgaagaaagtgtctggtaacagcccggtgattttcgacgtgacccacgcactgcaatgccgcgatccgtttggcgcagcttccggtggtcgtcgtgctcaggtggctgagctggcacgagccggtatggcggtaggtctggcggggctgtttattgaagcgcatccggatccggaacatgcgaaatgtgatggtccatccgcgctgccgctggctaaactggaaccgttcctcaagcagatgaaagcgattgatgatctggtgaaaggtttcgaagaactggataccagcaagtaatcttttttgcttgaaaaataaagtattagcgttctgcgttaagacttttttcatgggtgccggatacaaaaaaggccgcaggctgttacccctgcggccggtttcgggcgcatattgccatcacggcagcctgacgcccgttttcaccttacttccggttacgccaccagctgacaatcgctgcggtaataattcccgccaggatcggtgctgccaggtcgtgccagaaaatcatggcaaactgcgcgagcgtcatatagccgccttgttgtaatgacaacattttgcggctattcttgaattgttctggttcaagattagcccccgttctgttgtcaggttgtacctctcaacgtgcgggggttttctctttccagcaaccaatgccaccagggataaagcccccgcaacattgcgcctcaccggataacgccggcttggtgtggatactacgactcaattcatcttcacttcatccctgaaatgtttgcaatgaagagtgcattccggtttttcaacagctgttacagtcatttcatgagtgctctggatgaggcttccagctcgggttgccaatatttacttgtggaagtgataaagacaaaaatggccgcaggctgttacccctgcggccggtttcgggcgcatattgccatcacggcagcctgacgcccgttttcaccttacttccggttacgccaccagccgacaatcgctgcggtaataattcccgccaggatcggtgccgccaggtcgtgccagaaagtcatggcaaactgcgcgagcgtcatatagccgccttgttgtaatgacaacattttgcggctattcttgaagtgtctggtttcaagattagcccccgttctgttgtcaggttttacctctcaacgtgcgggggttttctctttccagcaaccaatgccaccagggataaagcccccgcaacattgcgcctcaccggataattccggcttggtgtggatactacgtctcaattcatcttcacttcatccctgaaatgtttgcaataaagagtacattccggcttttcaacagctgttgcagtcgtttcatgagtgctctggatgatgcttccagctcgggttgccaatatttacttgtggaagagataaagacaaaaatggccgcaggctgttacccctgcggccggtttcgggcgcatattgccatcacggcagcctgacgcccgttttcaccttacttccggttacgccaccagctgacaatcgctgcggtaataattcccgccaggatcggtgctgccaggtcgtgccagaaaatcatggcaaactgcgcgagcgtcatatagccgccttgttgtaatgacaacattttgcggctattcttgaagtgtctggtttcaagattagcccccgttttgttgtcaggttttacctctcaacgtgcgggggttttctctttccagcaaccaatgccaccagggataaagccccgcaacattgcgcctcaccggataacgccggcttggtgtggatactacgtcgcaattcatcttcacttcatccctgaaatgtttgcaatgaagagtacattccggcttttcaacagctgttgcagtggtttcgtgcagggtgtggtacaggctcgcaattctgattaacgacctgtccaggtagtatgaagaaatacaataagcaggaatttatattatctcccccgattaccgtcatcggaggagatataactgtcaggcaaatatcgtcatcaaataggcggcaaacagtgccagatgcgctgcgccattgagcatgttagtacgtccggtggagaaggagatatggcacagcactaaagaggccaccatcaccaccatttctggcgcaccaagtgcaaactgcaattcgttacccgtcataaaggcaattagcgtgacgacaggtacggtaaggctaatggttgctaacacactaccaaagaacagattcatcgcgcgctgaacctggttgttcaacactgcttttaatgcacctaaaccttccgggctcagaatcaacagtgccaccaggaagccagtaaaggcgacaggggcattcatgctgtcgagcaatgtctccaggctgctggcgttcattttggtcaccgcaataacggcaatcagatggataatcaaccagatagcatgccacaggctgctatgggcagacggtttaccgtgatgcgggtcgtcatcatcactgtcatcttcgtgctcgtagacaaacaaactttgatgcgttttggtctggatcagcaaaaatacgccatacattgccgcagaaattaatgctaccagtaacgcctgaccggtactaaaattcgccgcaggcagagccattggaaataccagtacgattatcgccagggggaacagcgcaattaaatactgcttgataccaaacagattcatatattgggtggcaaacttacgaccgcccaacaataaactaaagccaaccagcccaccggtaacaatcataatgatactatagagcgtatcacgcattagcgttggcgcggcgtcgccggttgccattaaagcactaatcaaactgacttcaagaataaccacactaaggctaagaataaggctaccgtaaggttctcccaggcgatgggctaatacgtccgcatgacggacaacactaaaggcgctacttaaaataccaataagcgcaagaagattgatggcaatgaccactggtagtgtctggctgcttccccacaggaacagcactaccagcgccagaaccgggaaaataaggctagtctccttgtggcgggtttttaccgcctcttgagcattactcattatggttatccctttgcagatgaatttatcgaaaatgtaaaaaataggtaggaaaaataacagaaagtgtctggatatcggtaacattttacgaatttttaccccgctgtcgattttttactcattggggcataaaaataagtattacgtttagacaatgtttgttttagcgtctcttaagaagagtctgacctgaaaattcttatgttttggcaagagtagatattgttgaccacacttaatgttcaactttgtaaaaggagtcaacgatgccgtataaaacgaaaagcgatctgccggaaagcgtaaagcacgttctaccgtctcatgcccaggatatctataaagaagcgttcaacagcgcatgggatcaatataaagataaagaagatcggcgtgatgacgccagtcgcgaagaaaccgcgcataaagtggcctgggctgctgtgaagcatgaatatgccaaaggggatgatgataaatggcataaaaaaagctaaaaccggtcgcttagttaaagctattcgtgcggtgttgccttgcaagtggtccgtggattgcatattgtcccgttagtggtttcaaaatgagcagtaaaaatgtccggaagacaccaaaaagttgtcgcagggaagtatgcagtggcggaagtgtaaggtgataacgcgtgatttcttgatgaatgccgattgtaaaacggcatttggtgccattgaagaaagtctcttatggagtgcagaacaacgggcggctagcctggcggcgacgctggcttgtcgacctgatgagggaccggtgtggatcttcggctatggaagcttgatgtggaatccggcactggagtttaccgaaagctgcaccggtacactggttggatggcatcgcgcattttgcctgcgcctgaccgccgggcgcgggactgcgcaccagccgggacggatgcttgcactgaaagagggcggacgcaccacaggcgtcgcctatcgactgccagaagagacgctggagcaggaactaaccctgttgtggaagcgagagatgattaccggctgttatctgccaacctggtgtcagcttgatcttgatgatggacgcacagtaaacgccattgtgtttattatggacccgcgacatccagaatatgaatctgatactcgcgctcaggtcatcgcgccgttgattgcggcggcgagcggtccgctgggaaccaacgcacaatacctgtttagtctggaacaggagcttatcaaactgggaatgcaggacgatgggctgaatgatttgctggtaagcgtaaaaaaactgctggcggagaattttccggatggtgtgttacgtccgggattcgcctgagtaaacttcccgcatagtggggcgtcagacgccccctcaaacattaaaatgtgagcactttatcggcactcagcgtccattgcgccagttccacaagagtaccgatttccaccccatcaatcagaggaagtgtactaatcccgcgcccgtcggtacaggttttgcacaatttcaccggtacattctgagcggtaaggatctccagcatttgctgaatgttgtagccttcccctggtttttgcccgcgcaacccggctgtgaccgcatcagacatgaggaacagacgcagatccagattgctctcctgctctcgtaacgcaatggccagccgcaagctgttaaacaaggattcgctcccgtaaggtgcgccattggcaacgatcacgattttttgcattatttactcctgtattcagggaattagacactcatcttctatcttactgcttctgcagcgtctgaccaatcggtcacatttttaaggattttcctgaaagcgcgagaaaatacgacaaaagttgccagtaatcgttattctttaaggctatggtttttcattattaccggaagttaccgacgttttgagccgtttcgttcctcgcattatcccgttttatttactcttgcttgtagcaggcggtacagctaacgcacaatctaccttcgagcaaaaagcggcaaatccctttgataataacaatgatggtctgccggatttaggcatggctcccgaaaatcatgatggggaaaaacactttgctgaaattgtgaaagatttcggcgaaaccagtatgaatgataacgggctggatactggcgagcaggcaaaagctttcgcattgggaaaagtccgcgacgcgcttagtcaacaggttaatcagcacgtagagtcctggctaagtccgtggggaaatgccagtgttgacgtcaaagtggataacgaaggacatttcaccggcagtcgtggaagctggtttgtgccgttacaagataatgatcgttatctcacctggagccagcttggtcttactcagcaggataatgggttggtgagcaatgtgggcgttgggcaacgctgggcgcgcggcaactggctggtgggttataacactttttatgacaacttgctggacgaaaatcttcagcgagcgggctttggtgccgaagcgtggggcgaatatttgcgattaagcgcaaacttttatcagccgtttgctgcatggcatgaacagacagccacgcaggaacaacggatggcgcgcgggtacgacctgacagctcggatgcgcatgccgttctatcaacacctcaataccagtgtcagcctagaacagtattttggtgatcgtgttgatttgtttaactctggtacgggttatcacaatcccgtcgcgttgagtctgggattaaattacacccctgtgccattagtcactgtgacggcccagcataaacagggtgaaagtggcgaaaatcaaaataacctcgggctgaatcttaattaccgctttggtgtaccgctcaaaaaacaactttctgcgggcgaggttgccgaaagtcagagcttacgtggtagtcgctatgacaatccgcagcgaaataatctaccgactcttgagtaccgacagcgaaaaacgttaacggtgtttctggcgacaccgccgtgggatctaaaacctggcgaaacagtgccgctgaaattacaaatccgcagtcgttacggtattcggcaactgatttggcagggcgatacgcagatattaagtttgacgccgggcgcacaagccaacagcgcggagggctggacgctgatcatgcctgactggcagaacggggaaggggcaagcaatcactggcgattgtctgtggtggtggaagataaccaggggcagcgtgtctcctccaatgagatcacgctaacgcttgtcgaaccgttcgatgcattgagtaacgacgaactgcgctgggaaccgtaatcagaaaatgcgctcctgatgcacccataccgctgcttccacgcgagacttgagcttcattttcttcagcatgtgcttgacgtgcacttttactgtgctttcggtgatatccaggcggcgggcaatcatcttgttcggcaaaccctgggcaatcagcttgagaatatcgcgctcgcgtggggttaactggttaacatcgcgctcagtagtggcacggttagcgcgcaagctggcggccagaacaggcgttaatgcttcgcttaataccatttcgccagcagctgcctgatgcaatgctttcagcagatcttccggttccatatcttttaacagatagccatccgcgccgcgtttcagtgcggtgaccacatcttcttcatggttagagacgctgaataccacaatgcgcccactgagggacttttcgcgcagtttatccagcgtttccagaccgttcatgccgggcatattgagatctaacaggatcagatcgggatcaagagactccgccagttcaataccctgttcgccattactcgcttcgccaaccacggtgatatctggtgccatactgataagctgttttacgccagttcgcagcatcgggtgatcgtcaatcagcaggatagtagccggttcctgattactcatgggtatctccttggacgtctgtgaaagttttttcgggaataaaggtgaccaccacttcggtgccaccactttcacgacggcggacgcggcaatcgcctcgtaaactttgcgcacgatcgcgcattattatcatgccgtagtgattgctgcggatggcattttcaggcacgccgcagccgttatcctggacggtcagtttgacctgattatcgttttgcgccaccgtcaccacgacttcactcgcttggctatgtttgagggcgttacttaatgcctcacgggcaatttgcaacaagtggattgcctgatggctaggcaccaggcgaggcggcaattgataatccagcttcaccgggaagccaaatttggcgctgtactcttcgcaactcgcctccagcgccggacgtaatccaggctcggtgagctgcaagcggaatgtggtgagcaattcacgcaactgcgcccaggatgcattcagttcgttacggatctgacttaacagttcgcggctgctttctggcagcgcatcgccctgcatctgtaaacaactcacctgcatcttcatgcaagagagagattgggcaatagaatcatgcagttcgcgcgcaatggtggcacgctcttccatcacgatcaactgttgctgacgttcctgatggcgatccagcgccagcgtggcggtgagttgttcaaccagggtatccaccagttgttgttgatcatggctaagatgacgcccctgcggcagggtcgccagcaaaataccgtactgcgtatgagagtcagccagccgccacttcagggtcgtgccgcgatcaccaacgggtaatacgccgcgcgggcagagctggcagcctttatcatcacaagtcatatctggctggcaggtaaactcctgatgattctcttcatcatcagtgtcatacacccgcaattcgatatcacgtagcagggttaaattctgtaagccgttgagtacaggactcaggcgttcacacagcggggcgcgggaatgcaaacggcggttagcctgccataaaaaagagaggatctgatttttatgctccagcccggcggttttctcctgaacccgctgctcaagtacggcataactttcggccagttctgcagacatattgttcaacgcagttccaagcatcgccatttcgttgcgcccgctgatgtttgcgcgttgggtaaaatcgcgatgactgacggcactcgccattgccagcagttgccgccacggttgtagcagtcgcgcccgcaaccagataatagtgaacaccagtaaaagtgccataaataccgccattacccgatggaccagtaccactgtctcgatgcgcatttccgtggtgcggtcaaaaccagataccagttgatcaagcccggcaacaaactggctgacatccgcactcaccgtttctcggttttgtgcacgcatcagcgcagggatcagttcattacgccagtaatcttgtaaaccctgtaattgcgccagttgtccgtctcgttctgctgctcgagtcaactcggcgctaaatgccgtttgttccatctctttaattaagggcttgtctttctcgcttaatggcactgccgccaacagacggtaactttgcatgcgcaggcttcccgctttgttgatcgcatgggcgctgccctgaacgccttgcaccagccagccagaaaccgccatccctgccagtccaatagcagtagaaagcaacacaataagcgcaacctgattaaccagggtgagcggagagagacaacgtttaagcatgtaaacctcttccttcaggctttaaatgagcaataaccttaatgaatgtgacgatacattctggaatggcagtattctcggctattggctgaagtatacccatacccggaaagagttactccttatttgccgtgtggttagtcgctttacatcggtaagggtagggattttacagcaccgtgaaaaatctcataatttttatgaagtcactgtactcactatgggtaatgataaatatcaatgatagataaagttatcttatcgtttgatttacatcaaattgcctttagctacagacactaaggtggcagacatcgaaacgagtatcagaggtgtctatgagtcacagttccgcccccgaaagggctactggagctgtcattacagattggcgaccggaagatcctgcgttctggcaacaacgcggtcaacgtattgccagccgcaacctgtggatttccgttccctgtctgctgctggcgttttgcgtatggatgttgttcagcgctgttgcggtgaacctaccgaaagtcggctttaattttacgaccgatcagctatttatgttgactgcgctgcctagcgtttctggcgcgttattacgtgttccatactcctttatggttcctatcttcggtggtcgtcgctggacggcgttcagcaccggtattctgattattccttgcgtctggctgggttttgccgtgcaggatacctccacgccttatagcgtcttcatcatcatctctctgctatgcggctttgctggcgcgaacttcgcatccagtatggcaaacatcagcttcttctttccgaaacagaagcagggtggcgcgctgggtctgaatggtggtctgggaaacatgggcgtcagcgtcatgcagttggttgctccgctggtggtaagtctgagcattttcgcagtatttggtagccagggcgtcaaacagccggatgggactgagctgtatctggcgaatgcgtcctggatatgggtgccgttccttgccatcttcaccattgcggcgtggtttggcatgaacgatcttgctaccagcaaagcctccatcaaggagcagttgccggtactcaaacggggtcatctgtggattatgagcctgctgtatctggcaaccttcggctccttcatcggcttctccgcgggctttgcaatgctgagtaaaacgcagttcccggatgttcagattctgcaatacgctttcttcgggccgtttattggtgcgctggcgcgttctgcaggtggtgcattatctgaccgtctgggcggaactcgtgtcacgctggtgaactttattctgatggcgattttcagcggcctgctgttcctgaccttaccgactgacgggcagggcggaagcttcatggcgttcttcgcggtcttcctggcgctgttcctgacagctgggctgggtagtggttccactttccagatgattagtgtgatcttccgtaaactgacaatggatcgcgtgaaagcagaagggggttctgacgaacgtgcgatgcgtgaagcggcaaccgacacggcggcggcgctgggtttcatctctgcgattggcgcgattggtggcttctttatcccgaaagcgtttggtagcagcctggcattaacgggtagcccagtcggcgcaatgaaggtatttttgattttctatatcgcctgcgtagtgattacctgggcggtatatggtcggcattctaaaaaataaaccgttactcgtcatacttcgggttacatgtgctgcggctgcgttcattcaccccagtcacttactttagtaagctcctgggattcattcacttgccgccttcctgtaaaccgaattatatagagtaaaatatttgattatcctttgcgcggcatgatgtcgcgctttttttatgcgtcatttagttacaacatactaatgttatatggtttatttcgccggatttcattaagagccattaatatgttacccatggggaatactccttaatacccatctgcataaaaatcttaatagtttaaataactacaggtataaaacgtcttaatttacagtctgttatgtggtggctgttaattatcctaaaggggtatcttaggaatttactttatttttcatccccatcactcttgatcgttatcaattcccacgctgtttcagagcgttaccttgcccttaaacattagcaatgtcgatttatcagagggccgacaggctcccacaggagaaaaccgatgagtaaattcctggaccggtttcgctacttcaaacagaagggtgaaacctttgccgatgggcatggccagcttctcaataccaaccgtgactgggaggatggatatcgccagcgttggcagcatgacaaaatcgtccgctctacccacggggtaaactgcaccggctcctgcagctggaaaatctacgtcaaaaacggtctggtcacctgggaaacccagcagactgactatccgcgtacccgtccggatctgccaaaccatgaacctcgcggctgcccgcgcggtgccagctactcctggtatctttacagtgccaaccgcctgaaatacccgatgatgcgcaaacgcctgatgaaaatgtggcgtgaagcgaaggcgctgcatagcgatccggttgaggcatgggcttctatcattgaagacgccgataaagcgaaaagctttaagcaggcgcgtggacgcggtggatttgttcgttcttcctggcaggaggtgaacgaactgatcgccgcatctaacgtttacaccatcaaaaactacggcccggaccgtgttgctggtttcagcccaattccggcaatgagcatggtttcttacgcaagcggtgcacgctatctcagcctgattggcggtacttgcttaagcttctacgactggtactgcgacttgcctcctgcgtctccgcaaacctggggcgagcaaactgacgtaccggaatctgctgactggtacaactccagctacatcatcgcctgggggagtaacgtgccgcagacgcgtaccccggatgctcacttctttactgaagtgcgttacaaagggaccaaaactgttgccgtcacaccagactacgctgaaatcgccaaactgtgcgatctgtggctggcaccgaaacagggcaccgatgcggcaatggcgctggcgatgggccacgtaatgctgcgtgaattccacctcgacaacccaagccagtatttcaccgactatgtgcgtcgctacaccgacatgccgatgctggtgatgctggaagaacgcgacggttactacgctgcaggtcgtatgctgcgcgctgctgatctggttgatgcgctgggccaggaaaacaatccggaatggaaaactgtcgcctttaataccaatggcgaaatggttgcgccgaacggttctattggcttccgctggggcgagaagggcaaatggaatcttgagcagcgcgacggcaaaactggcgaagaaaccgagctgcaactgagcctgctgggtagccaggatgagatcgctgaggtaggcttcccgtactttggtggcgacggcacggaacacttcaacaaagtggaactggaaaacgtgctgctgcacaaactgccggtgaaacgcctgcaactggctgatggcagcaccgccctggtgaccaccgtttatgatctgacgctggcaaactacggtctggaacgtggcctgaacgacgttaactgtgcaaccagctatgacgatgtgaaagcttataccccggcctgggccgagcagattaccggcgtttctcgcagccagattattcgcatcgcccgtgaatttgccgataacgctgataaaacgcacggtcgtagcatgattatcgtcggtgcggggctgaaccactggtatcacctcgatatgaactatcgtggtctgatcaacatgctgattttctgcggctgtgtcggtcagagcgggggcggctgggcgcactatgtaggtcaggaaaaactgcgtccgcaaaccggctggcagccgctggcgtttgcccttgactggcagcgtccggcgcgtcacatgaacagcacttcttatttctataaccactccagccagtggcgttatgaaaccgtcacggcggaagagttgctgagtccgatggcggacaaatcccgctataccggacacttgatcgactttaacgtccgtgcggaacgcatgggctggctgccgtctgcaccgcagttaggcactaacccgctgactatcgctggcgaagcggaaaaagccgggatgaatccggtggactatacggtgaaatccctgaaagagggttccatccgttttgcggcagaacaaccagaaaacggtaaaaaccacccgcgcaacctgttcatctggcgttctaacctgctcggttcttccggtaaaggtcatgagtttatgctcaagtacctgctggggacggagcacggtatccagggtaaagatctggggcaacagggcggcgtgaagccggaagaagtggactggcaggacaatggtctggaaggcaagctggatctggtggttacgctggacttccgtctgagcagcacctgtctctattccgacatcattttgccgacggcgacctggtacgaaaaagacgacatgaatactagcgatatgcatccgtttattcacccgctgtctgcggcggtcgatccggcctgggaagcgaaaagcgactgggaaatctacaaagccatcgcgaagaaattctccgaagtgtgcgtcggccatctgggtaaagaaaccgacatcgtcacgctgcctatccagcatgactctgccgctgaactggcgcagccgctggatgtgaaagactggaaaaaaggcgagtgcgacctgatcccaggtaaaaccgcgccacacattatggtcgtagagcgcgattatccggcgacttacgaacgctttacctctatcggcccgctgatggagaaaatcggtaatggcggtaaagggattgcctggaacacccagagcgagatggatctgctgcgtaagctcaactacaccaaagcggaaggtccggcgaaaggccagccgatgctgaacaccgcaattgatgcggcagagatgatcctgacactggcaccggaaaccaacggtcaggtagccgtgaaagcctgggctgccctgagcgaatttaccggtcgtgaccatacgcatctggcgctgaataaagaagacgagaagatccgcttccgcgatattcaggcacagccgcgcaaaattatctccagcccgacctggtctggtctggaagatgaacacgtttcttacaacgccggttacaccaacgttcacgagctgatcccatggcgtacgctctctggtcgtcagcaactgtatcaggatcaccagtggatgcgtgatttcggtgaaagcctgctggtttatcgtccgccgatcgacacccgtagcgtgaaagaagtgataggccagaaatccaacggcaaccaggaaaaagcgctcaacttcctgacgccgcaccagaagtggggtatccactccacctacagcgacaacctgctgatgctgactttaggtcgcggtggtccggtggtctggttgagtgaagccgatgccaaagatctgggtatcgccgataacgactggattgaagtcttcaacagcaacggtgctctgactgcccgtgcggttgtcagccagcgtgttccggcagggatgaccatgatgtaccacgcgcaggaacgtatcgttaacctgcctggtagcgaaattacccaacagcgtggtggtatccataacagcgtcacccgtatcacgccgaaaccgacgcatatgatcggcggctatgcccatctggcatacggctttaactactatggcaccgtaggttctaaccgcgatgagtttgttgtagtgcgtaagatgaagaacattgactggttagatggcgaaggcaatgaccaggtacaggagagcgtaaaatgaaaattcgtagtcaagtcggcatggtgctgaatctcgataagtgcatcggctgccacacctgtagtgttacctgtaaaaacgtctggaccagccgtgaaggcgtggaatatgcgtggttcaacaacgtggaaaccaagccgggccagggcttcccgactgactgggaaaaccaggaaaaatacaaaggcggctggatccgtaaaatcaacggcaaactgcagccgcgcatgggtaaccgtgccatgctgctgggtaaaatcttcgctaacccgcatctgccggggatcgacgattattacgagccgttcgattttgactatcagaacctgcataccgcgccggaaggcagcaaaagccagccgattgcccgtccgcgtagcctgattaccggggaacggatggcgaaaatcgaaaaagggccgaactgggaagatgacctgggcggtgagtttgacaaactggcgaaagacaagaacttcgacaacatccagaaggcgatgtatagccagttcgaaaacaccttcatgatgtatttgccgcgcctgtgcgaacactgcctgaacccggcatgtgtggcgacctgcccgagcggtgcgatttacaagcgtgaagaagatggcatcgtcctgatcgaccaggataaatgccgtggctggcgtatgtgcatcactggatgcccgtacaaaaaaatctacttcaactggaagagcggtaagtctgagaagtgcatcttctgctatccgcgtattgaagcgggtcagccgaccgtgtgcagtgaaacctgtgtcggtcgtatccgttatcttggcgtgctgttgtacgatgccgacgctattgaacgtgcagccagcaccgagaacgagaaagatctttaccagcgtcagctggacgtgttcctcgatccgaacgatccgaaagtcatcgagcaggcgattaaagacggtattccgctgagcgttattgaagccgcacagcagagcccggtttataaaatggcaatggaatggaaactggcgctgccgctgcatccggaatatcgcacactgccgatggtctggtacgtgccgcctctgtctccgattcagtctgcagcagacgcgggtgagctgggtagcaacggcattctgccagacgtcgaaagcctgcgtattccggtacagtatctggcgaatctgctgaccgccggtgataccaaaccggtactgcgcgcactgaaacgtatgctggcgatgcgtcattacaaacgtgctgaaaccgttgacggtaaagttgatacccgtgcgctggaagaggtcggtctgaccgaagcccaggcacaggagatgtaccgttatctggcgattgctaactacgaagatcgctttgtggtgccgagtagtcatcgtgaactggcacgggaagccttcccggagaaaaatggctgcggctttacctttggtgatggctgccacggtagtgataccaaattcaatctgttcaacagccgtcgtatcgatgccatcgatgtgaccagcaaaacggagccgcatccatgatcgaactcgtgattgtaagccgtctccttgaatatccggatgctgccttatggcagcatcaacaagagatgtttgaggcgattgccgcgagcaaaaatctgccaaaagaggatgcccatgcgctgggcattttcctgcgcgatttaacgacgatggatccgctcgatgcccaggcgcagtacagcgaactgttcgaccgtggccgcgccacgagtctgttgctgtttgaacatgtgcacggcgaatcccgcgaccgcggccaggcgatggtggacctgctggcgcagtacgagcagcacggcttgcagttaaacagccgcgaattgccggaccatctgccgctgtatctggagtacctggcgcagctgccgcaaagcgaagccgtggaaggtttgaaagatatcgcgccgattctggcattgctgagcgcgcgtctgcaacagcgtgaaagccgttatgccgtgctgtttgatctgctgctgaaactggcgaataccgctatcgacagcgacaaagtggcggaaaaaattgccgacgaagcgcgcgatgatacgccgcaggcgctggatgctgtctgggaagaagagcaggttaaattctttgctgacaaaggctgcggtgatagtgcaatcactgcgcatcagcgtcgctttgccggtgccgtcgcgccgcaatatctgaatatcaccaccggaggacagcactaatgcaattcctgaatatgttcttctttgatatctacccgtacatagccggggcggtcttcctgattggtagctggctgcgttatgactacgggcagtacacctggcgcgcggcgtccagccagatgctggatcgcaaagggatgaacctggcgagcaacctgttccatatcgggattctggggatttttgtcggtcacttcttcggtatgctgacgccgcactggatgtatgaagcctggctgccgattgaagtgaaacagaaaatggcaatgtttgctggtggtgccagcggcgtgctgtgtctgattggcggcgtgctgttgctgaaacgtcgtctgttcagcccacgcgtgcgtgcaaccactaccggagcggatatcctgatcctgagcctgctcgttatccagtgcgcgctgggcctgttgaccattccgttctccgctcagcatatggacggtagcgagatgatgaaactggttggctgggcgcagagcgtggtgaccttccacggtggcgcttctcaacacctcgatggtgtggcgtttatcttccgtctgcacctggtgctggggatgacgttattcctgctgttcccgttcagccgtctgatacacatctggagcgtaccggtggagtatctgacacgtaagtaccagctggtgcgcgctcgtcactaagcgaattttagttcacatagaccctgcttcggcggggtttttttatgggcacggtgcggggtgagttgtcggatgcgcttcgcttatccgacctacaggggaggatattgtaggcccggtaaacgtggtgccatcgggcaaaattagctcggagtaacaggttttgattatttaaggaagcgatggtggtgggggaaggattactcagcgctgcgcgcttcgcccttcgggtcgttgcctgcggcaacgctctcagcctggcgctcaagagcaaccttggtcgaagcttcagttccttccccgcttgggcagaatatttgattgcggatagctttgagaattccggggcttttgaaagtgatggtggtgggggaaggattactcagcgctgcgcgcttcgccctagcggtcgttgcctgcggcaacgctctctcgctgacgctcgagccgaaccttaatcgaagcttctcatccttccccgcatgggcagaatatttgattgcggattcgcttgagagttcagggacttttgaaagtgatggtggtgggggaaggattactcagcgctgcgcgcttcgcccttcgggtcgttgcctgcggcaacgctctctcgctggcgctcgagtgctaccttggtcgaagcttctcatccttccccgcatgggcagaatatttaattgcggattcgttgggaagttcagggacttttgaaagtgatggtggtgggggaaggattcgaaccttcgaagtcgatgacggcagatttacagtctgctccctttggccgctcgggaaccccaccaggggtaattcaaattttgaggtaatgcttgagatggtggtgggggaaggattattcgtcgcttcgctcctcacccttcgggccgttgcctgtggcaacgttctctcgctttcgctcgaatcgaaccttagtcgaaggttctcacccttccccgatgagtgcaaactttcacaatctcaccgaagttaccacatcgctgtggtgaattatggtggtgggggaaggattcgaaccttcgaagtcgatgacggcagatttacagtctgctccctttggccgctcgggaaccccaccacggggtaatgctttttactggcctgctcccttatcgggaagcggggcgcatcatatcaaatgacgcgccgctgtaaagtgttacgttgagaaaaatgaactggttgcgtaattttcatccgtaacggattaaaggtaaccagttatttttgctggcgattaaagaataatcgttcgattaccgtaaacaaagacgcgctgtgccagtactttgtatagtgcacgacttaagacgtttttctcgacgtcacgacctgcgcgcatcatatcttcagctgtgtaggtatgatcgacatgaataacgtcctgcatgatgattgggccttcgtccagattgtcattcacatagtgagcggttgcgccaataatcttcacaccacgttcataggcctggtgataaggacgtgcgccaataaacgctggcaggaaactatggtgaatattgatgatcttattcgggaagcgtgccacaaattccggcgttaatacccgcatatacttcgccagcaccacgtagtcaggttgataagcatcaatggcatccgccatcttttgatcgtgctcgttgcgggttaacccttcatggcttaccagctcaaacggaatatcaaaacgctcaaccagagaacgtaaagtatcgtggttaccaataactgccgcgatttcgacatccaggccgccgtaattggctttcatcaacaaatcgccaaggcaatgcgcttctttagtgaccagaatcactatccggcgacgaccggcaggattcagctcacgcacggagccttctggcaatgcgctatcgagatccgccagcagggtggaatcattaaaaatcccttccagttccgtgcgcataaaaaagcgcccggtacggtgatcaacaaattcattgttctgtacgatatttaactcgtgcttgtagcaaatattggtaatacgtgcgatcagacctttttggtccggacaaatagtacgcagaactttacgttggagactatgcattgctggaaaaaccttgttgagagtgtttgctaaaccgtaccgtcaaccattattggccgcagcactttttaaattttttaccactaccacaagggcagggatcgttgcgaccaaactgcggacgtgtaccgtcaatatagtaccattgaccgttttctttcaaaaatcggctacgttcaattattgcacctgttttaccaccttcggtaaatcgagcaacaaaactgacaaatccgatattgtcggcgtcctgccaacaatgttcaaatacggtcaatcccaaccattcagtatgcgcaaatccggccatcaattcggcacgtaacgccgctgctccacaagagggatgccaggtctttattaaataatctgcgtcttgcatcacaaaagcgcagtaacggctacgcatgagatgttctggatcaggtgcaaccttttcaccagacacataagggtggcaacataggctatactcgacagcactaccacagggacaaagctgagacacaaataatctccctggaaacaataacggcgtattaaccgcctgagtagcactatgttaaccgagcagtagcgatgtggctacgattgcattccaggggaatcttgcgggaataatgagaaagataaaaatagggctggcgctgggatctggcgcggcgagaggttggagccatattggcgttattaatgcgctaaaaaaagtgggtattgaaattgatatcgttgcaggatgtagtattggtagcctggtgggcgctgcctatgcatgcgatcgattatctgcgctggaagattgggtgacctctttcagttattgggatgttttacgcctgatggatctctcctggcagcgcggtgggttactgcgcggcgagcgtgtcttcaatcaataccgcgaaataatgccggaaacagagatcgaaaattgttcccgtcgctttgcggctgttgccaccaatttaagtacgggacgtgaattatggtttactgaaggcgatctccatcttgctattcgcgcaagttgcagtattccaggactcatggcacctgttgcacataacggctactggctggttgatggagcagtcgttaacccaattcctatttccctcacgcgtgcattgggggctgatattgtgatagcggttgacctgcagcacgatgctcatttgatgcaacaagatttgctctcctttaatgtcagtgaagaaaatagcgagaatggtgattctctgccgtggcatgcgcgtctgaaagaaaggttaggcagcataacgacacgtcgggcggtgacagcgccaacggcaacagagattatgaccacttctatccaggtgctggagaaccgccttaaaaggaaccgcatggcaggtgatccgcccgatattctgattcaacctgtttgcccgcaaatatctacgcttgatttccatcgcgcgcacgctgccattgcggccggacagctggcagtggaaaggaaaatggacgaacttttgccgttggtacgcaccaacatttgaccagaatttttatctacacttaagttaattctgacaggcgcaggtggcaatagcatgccactattgagtaaagccagtcaggggagagaacatgacgcagccattggtcggaaaacagattctcattgttgaagatgagcaggtatttcgcagccttctggatagttggttttccagtttgggagcgacaacggtactggcggctgatggggtggatgcccttgagttgctgggaggtttcactccagacctgatgatatgtgatatcgcgatgccacgaatgaacgggcttaaactgctggagcatatacgtaacagaggcgaccagaccccagttctggtgatatctgccactgaaaatatggcagatattgccaaagcgttacgtctgggcgttgaagatgttttgctgaaaccagttaaagatctgaatcgcttgcgcgagatggtttttgcctgtctctatcccagcatgtttaatagccgcgttgaggaagaggaaaggctttttcgcgactgggatgcaatggttgataaccctgccgcagcggcgaaattattacaggaactacaaccgccggttcagcaggtgatttcccattgccgggttaattatcgtcaattggttgccgcggacaaacccggcctggtgcttgatattgccgcacttagcgaaaacgatctggcattttattgccttgatgtcacccgagctggacataatggcgtacttgctgccttgttattacgcgcattgtttaacggattattacaggaacagcttgcacaccaaaatcaacggttgccagagttgggcgcgttattgaagcaggtaaaccatttacttcgtcaggccaatctgccggggcagtttccgctattagttggctattatcatcgcgaactgaaaaatctcattctggtttctgcgggtctgaatgcgacgttaaataccggcgaacaccaggtgcaaatcagtaatggtgttccgttaggcactttaggtaacgcttatttgaatcaattgagccagcgatgcgatgcctggcaatgccaaatatggggaaccggtggtcgactgcgcttgatgttgtctgcagaatgagcaaacgataacgcgggctaaatttgcattacctgctaatgtcggctggtggtactatcgtcgccattcgtataagtaattgtcttaattatgctaactcgcctccttttcagaacttagccccttcggggtgctgatatactgggatgcgatacagaaatatgaacacgttcaaaacacgaacagtccaggagaatttaaatggctgccattaatacgaaagtcaaaaaagccgttatccccgttgcgggattaggaaccaggatgttgccggcgacgaaagccatcccgaaagagatgctgccacttgtcgataagccattaattcaatacgtcgtgaatgaatgtattgcggctggcattactgaaattgtgctggttacacacagttctaaaaactctattgaaaaccactttgataccagttttgaactggaagcaatgctggaaaaacgtgtaaaacgtcaactgcttgatgaagtgcagtctatttgtccaccgcacgtgactattatgcaagttcgtcagggtctggcgaaaggcctgggacacgcggtattgtgtgctcacccggtagtgggtgatgaaccggtagctgttattttgcctgatgttattctggatgaatatgaatccgatttgagtcaggataacctggcagagatgatccgccgctttgatgaaacgggtcatagccagatcatggttgaaccggttgctgatgtgaccgcatatggcgttgtggattgcaaaggcgttgaattagcgccgggtgaaagcgtaccgatggttggtgtggtagaaaaaccgaaagcggatgttgcgccgtctaatctcgctattgtgggtcgttacgtacttagcgcggatatttggccgttgctggcaaaaacccctccgggagctggtgatgaaattcagctcaccgacgcaattgatatgctgatcgaaaaagaaacggtggaagcctatcatatgaaagggaagagccatgactgcggtaataaattaggttacatgcaggccttcgttgaatacggtattcgtcataacacccttggcacggaatttaaagcctggcttgaagaagagatgggcattaagaagtaacatccgtatcggtgttatccacgaaacggcgttgagcaatcgacgccgtttttttatagcttattcttattaaattgtcttaaaccggacaataaaaaatcccgccgctggcgggattttaagcaagtgcaatctacaaaagattattgcttgatcaggaaatcgtcgagggatttaccttgctcatccattgcttttttgattacagctggagtacggccttggccagtccaggttttagtttcgccgttttcgtcaacgtagctatattttgccggacgctgagcacgtttagctttggtgccagatttaacggcagcaaggctattcagcagttcgttcgggtcaataccgtcagcgatcagcatttcgcgatattgctgcagtttacgagtgcgctcttcaacttcagcagcagccgcgctttcttcttcgcgacgttcgttaacaacaacttctaatttttccagcatttcttccagcgtttcaagtgtacattctcttgcctgcgcacgaagagtacggatgttgttcagaattttaagtgcttcgctcattgtagtaatctcaaacttatattggggtggtttgttgaggtaataatagagccttaaattcagttgtgcaatagccaggaatgtaaggaattcaaaattgttctttattttgtgccgccaataaatatcttttcataaaattagccagaaaagacgcggcatatagccctatttacaccgatgatttcgcagcacgtgaggttaaaacttcctgattcatgtcacattttatggggagattatcgtaggctgacgacctttcagtcttctgtattagttgtgtttacgagaattccctattaagcgaatgatgaaaagtagaacagtcgcaataagagcatggacttagtattgcactatctcctggaggtcaacagagggctattacttgcgcaacaggttaaagattgtgaatagttaccagcagtcatttacccgcttataacaagcgaggcagttgtaatgatagctcagaaggattatgcaaggcttcgtaagggagaacgcatatacccacttctgtgcatactgttgagctgaaaaactgacgaattatgataaactccagccaactttatttcatatcattgagggcctgtggctgatggcacagctatatttctactattccgcaatgaatgcgggtaagtctacagcattgttgcaatctagttacaattaccaggaacgcggcatgcgcactgtcgtatatacggcagaaattgatgatcgctttggtgccgggaaagtcagtagccgtataggtttgagtagccctgcaaaattatttaaccaaaatagtagtttatttgatgagattcgtgcggaacatgaacagcaggcaattcattgcgtactggttgatgaatgccagtttttaaccagacaacaagtatatgaattaagcgaggttgtcgatcaactcgatatacccgtactttgttatggtttacgtaccgattttcgaggtgaattatttattggcagccaatacttactggcatggtccgacaaactggttgaattaaaaaccatctgtttttgtggccgtaaagcaagcatggtgctgcgtcttgatcaagcaggcagaccttataacgaaggtgagcaggtggtaattggtggtaatgaacgatacgtttctgtatgccgtaaacactataaagaggcgttacaagtcgacagtttaacggctattcaggaaaggcatcgccacgattaataagaatttctttactgacagggtgagcagggcacttttatcctgtcagttcgttttacgcacttcttccgggctatatacccttctcggcagttttttaacgccgctatacgcctcacagggctcttaagcaccgacgttgacttgtgacctgtaaagtacaatatccctgtgtttaggcgttatacatcgtcgcaaatatgatgaaggctaatgctgtcggtttatggaaaagttgctttgggtaaacaaaaaatacggccccagaagggcaatgccgttcacttaagaggagcggcactatgtttcacaggataacgggtttttgatatcttaaccgacctcggccttgatggtcgggggcgttttgttatgaacaccacttccagagcaccccgaagatgctccagtcgtttcgggatggtccctggtgacgccgtgtttcccagctctatcatttctgatgcgatattcttccacgcaggcagtagccagtggcggttacaacccttctggttcagcgtcagcagcaggtcttcgctgtaaaaaagtttatcaaacaacgtaatagagttatccgggatggtggcgagcatggagtgggccagcacagtttcgctctgccggtaaggtgcggtcacggcattcagcagaatgtgacttcccaggttcattaaggccaccagacgcataaccgggtaggcgttctgccgcttagtggatgtgttggcagacccataatattcacgcagctcgggtttatcaggtgtcctgaactgtgcgccatcaatggcaaaaagttgcaggccgtgccagtcatccttcaggtaacgttccgcgcccctgtctgtgcggtctggcggaagagccattccactggggcggcccccacgcgctgacgcgcctgggtgacagcgctgcgggccagcaggttcatccccgcttcgccatccgcgctcaggttcagacggcgaacaacatcggtaattggctcattgcaccaccatccagataaccatgtcccccggtaaacgacggcggcgaacggtcgcatgagcagaaagcgtcaggcagtgttgtatccactcggtgggaaggtgttctgcaaatagttgtgcagagggcggaggcataagcggatggtcactgaaatcgagcagatcattgagaagtggcataagaaaacggctccctgttgtggaagccgttatagtgcctcagtttaaggatcggtcaactaatccttaactgatcggcattgcccagaaggggccgtttatgttgccagacagcgctactgattaagcggattttttcgcttttttctcagctttagccggagcagcttctttcttcgctgcagtttcaccttctacataatcacgaccgtagtaggtatccagcagaatctgtttcagctcggagatcagcgggtaacgcgggttagcgccggtgcactggtcatcgaatgcatcttcagacagtttatccacgttcgccaggaagtctgcttcctgaacgccagcttcacggatagatttcggaatacccagttcagctttcagcgtttccagccatgccagcagtttctcgatcttagcagcagtacggtcgcccggtgcgctcagacccaagtggtcggcaatttcagcataacgacggcgagcctgcggacggtcatactggctgaatgcagtctgcttggtcgggttgtcgttcgcattgtagcgaataacgttacaaatcagcagggcgtttgccagaccgtgcggaatatggaactgggaacccagtttgtgcgccatactgtgacatacacccaggaaggcgttcgcaaacgcgatacccgcgatagtcgctgcactgtgaacacgttcacgcgctaccggatttttagacccttcgtggtaggacgctggcagatattctttcagcagtttcagtgcctgcagagcctgaccatcagagaactcagatgccagtacagaaacataagcttccatggcgtgagttactgcgtccagaccaccgaaagcacacagggacttcggcatgtccataaccaggttggcgtcgacaatcgccatatccggagtcagcgcatagtctgccagcggatatttctgaccagtagcgtcgtcagttacaaccgcaaacggagtgacttcagaacctgtaccagaagtggtggtgacagcgatcattttcgctttcacgcccattttcgggaacttgtagatacgtttacggatatccataaagcgcagcgccagctcttcgaagtgagtttccggatgttcgtacataacccacatgatcttcgcggcgtccatcggggaaccaccacccagcgcgataatcacgtctggtttgaaggagtttgccagttctgcacctttacgaacgatgctcagggtcgggtccgcttctacttcgaagaagacttcagtttcaacgcctgctgctttcagtacggaagtgatctgatcagcataaccattgttgaacaggaagcggtcagtcacgatgagcgcacgtttgtggccatcagtaatcacttcatccagcgcgattggcagggagccacggcggaagtagatagatttcggaagtttgtgccacaacatgttttcagctcgcttagcaacggttttcttgttgatcaggtgtttcggaccaacgttttcagagatggagttaccaccccaagaaccacaacccagagtcagggaaggtgcgagtttgaagttatacaggtcaccgataccaccctgagacgctggggtgttaatcaggatacgcgccgttttcattttctgaccgaagtaagaaacgcgagccggttggttatcctggtcagtgtacaggcaagaggtatgaccgataccgcccatagcaaccagtttctctgctttttctaccgcgtcttcgaaatctttagcgcggtacattgccagagtcggggacagtttttcatgtgcgaacggttcgctttcatcaacaacggtcacttcaccgatcagaatcttggtgttttctggtacagagaagcctgccagttcagcaattttataggctggctgaccaacgatagccgcgttcagcgcaccgtttttcaggataacatcctgaacagctttcagctctttaccctgcaacagatagccgccgtgggttgcaaaacgttcacgtacagcgtcataaacagagtcaacaacaacaacagactgttcagaagcacagattacgccgttgtcgaaggttttggacatcagtacagatgcaactgcacgtttgatatcagcagtttcatcgataacaactggagtgttgcccgcgcctacaccgatagctggtttaccggagctgtatgcggctttaaccatgcccggaccaccagtcgcgaggatcaggttgatgtctgggtggtgcatcagtgcgttagacagttcaacagaaggttgatcgatccagccgatcagatctttcggagcaccggcagcgatagcagcctgcagaacgatatcagccgctttgttggtggcatcttttgcacgcgggtgcggggagaagataatggcgttacgggtcttcagactgatcaggcttttgaagatagcagtactagtcgggttagtggtcggaacgataccgcaaataataccgattggttcagcgatagtgatggtaccaaaagtgtcgtcttcagacagaacaccacaggttttttcatctttataggcgttgtagatatattcagaagcaaagtggtttttgatcactttatcttcgacgatacccatgccggattcggcaacggccattttcgcgagtgggattcgagcatctgcagcagccagagcggcggcgcggaagattttgtctacttgctcttgagtgaaactggcatattcacgctgggctttttttacacgctctacgagtgcgttaagttcagcgacattagtaacagccataatgctctcctgataatgttaaacttttttagtaaatcatctgctcgaatacgagagtatagtcagtgcggtgatgatttgcttaacctatgaaaatcaaaagcttactcgcgctcacactcactgtgatttactaaaagagtttaaacattagagttattatctctaatgcgtcacttccaggtggcgtaagcaagattactcacttctgggtactgattacgtgatccaaatcaaatttttgcaaagctgacacctttcagcatcgcttttcgccattatagctaacagttaataaattgtagtatgatttggtggctacattagcatgttttgcacaactagataacaataacgaatgatagcaattttaagtagttaggaggtgaaaaatgctgtcaaaaggcgtattgtcagcgcgtcttttcaaccttatttatggctaacattatccggcttttgcttcggagctaaccgtgattcagaccttttttgattttcccgtttacttcaaatttttcatcgggttatttgcgctggtcaacccggtagggattattcccgtctttatcagcatgaccagttatcagacagcggcagcgcgaaacaaaactaaccttacagccaacctgtctgtggccattatcttgtggatcagcctttttctcggcgacacgattctacaactttttggtataagtattgatagcttccgtatcgccgggggtatcctggtggtgacaatagcgatgagcatgatcagcggcaagcttggcgaggataaacagaacaagcaagaaaaaagtgaaaccgcggtacgtgaaagcattggtgtggtgccactggcgttgccgttgatggcggggccaggggcgatcagttctaccatcgtctggggtacgcgttatcacagcattagctatctgtttggtttctttgtggctattgcattgttcgctttatgttgttggggattgttccgcatggcaccgtggctggtacgggttttacgccagaccggcatcaacgtgattacgcgtattatggggctattgctgatggcattggggattgaatttatcgttactggtattaaggggattttccccggcctgcttaattaattcctttcaaatgaaacggagctgccatgctccgtttacttcgtcattatttttactttgttcccgcgcagttatcaaaagcaaaaggaataggtaaaaatattcttctcaaattacagttagttataaggatttccttaactgcttctcctcaccatcatgttattttcgccacatcataatcctgggcttgctgaagaataattgaaatgatattattaattccactgcctttggtagaggaaagtgctaaataataatcaattgttaaattattgtgcatttcactactggaactgtaatcagaaaagatagacatgcttagccaatctctatttgattgaattgaaagatgtttgttaaggcatggatgcaagctatagattctgatacggtcaataaaagagaattgcttaacaattttgcaaaatgtattggcgagtaagaaccgcatttggtactttccgggcaaccgccagacgattctttattggtaatgagaataattaacaattaaagagcgtcgcgaaagaataatgtgtctcgacaggggagacacagtacgaatcgacataaggtgatcgtctgaatcaccagaataaataaagtcggtgatagtaatacgtaacgataaagtaacctgacagcagaaagtctccgagcctgtgcagggtcccaatccgggattacacatgctggttaataccagtaattataatgagggagtccaaaaaacaatgaccaacatcaccaagagaagtttagtagcagctggcgttctggctgcgctaatggcagggaatgtcgcgctggcagctgatgtacccgcaggcgtcacactggcggaaaaacaaacactggtacgtaacaatggtagtgaagttcagagtttagatccgcacaaaattgaaggtgttccggagtctaatatcagccgagacctgtttgaaggcttactggtcagcgatcttgacggtcatccagcacctggcgtcgctgaatcctgggataataaagacgcgaaagtctggaccttccatttgcgtaaagatgcgaaatggtctgatggcacgccagtcacagcacaagactttgtgtatagctggcaacgttctgttgatccgaacactgcttctccgtatgccagttatctgcaatatgggcatatcgccggtattgatgaaattcttgaagggaaaaaaccgattaccgatctcggcgtgaaagctattgatgatcacacattagaagtcaccttaagtgaacccgttccgtacttctataaattacttgttcacccaagtactagtccggtgccaaaagccgctatcgagaaattcggcgaaaaatggacccagcctggtaatatcgtcaccaacggtgcctataccttaaaagattgggtcgtaaacgaacgaatcgttcttgaacgcagcccgacctactggaacaacgcgaaaaccgttattaaccaggtaacctatttgcctattgcttctgaagttaccgatgtcaaccgctaccgtagtggtgaaatcgacatgacgaataacagcatgccgatcgaattgttccagaagctgaaaaaagagatcccggacgaagttcacgttgatccatacctgtgcacttactattacgaaattaacaaccagaaaccgccattcaacgatgtgcgtgtgcgtaccgcactgaaactaggtatggaccgcgatatcattgttaataaagtgaaagcgcagggcaacatgcccgcctatggttacactccaccgtatactgatggcgcaaaattgactcagccagaatggtttggctggagccaggaaaaacgtaacgaagaagcgaaaaaactgctggctgaagcgggttataccgcagacaaaccgttgaccatcaacctgttgtataacacctccgatctgcataaaaagctggcgattgctgcctctagtttgtggaagaaaaacattggtgtaaacgtcaaactggttaaccaggagtggaaaacgttcctcgacacccgtcaccagggtacttttgatgtggcccgtgcaggctggtgtgctgactacaacgaaccaacttccttcctgaacaccatgcttagcaacagcagcatgaataccgcgcattataagagcccggcctttgacagcattatggcggaaacgctgaaagtgactgacgaggcgcagcgcacagctctgtacactaaagcagaacaacagctggataaggatagcgccattgttcctgtttattactacgtgaatgcgcgtctggtgaaaccgtgggttggtggctataccggcaaagatccgctggataatacctatacccggaatatgtacattgtgaagcactaatggcaatacgtggggcaggagtgtcctgctccacggtgtctgatttttatcgcattacagaaggcacaggccagaaggtagggcaatgttaaaatttattctacgtcgctgtctggaagcgattccgacgctatttattcttattactattagcttctttatgatgcgcctcgcgccgggaagcccttttaccggcgaacgtactttaccgccagaagtgatggccaatatcgaagcgaaatatcatcttaatgatccgatcatgacacagtatttcagctacctgaaacaactggcgcacggtgatttcggtccaagctttaaatataaagattatagcgtcaatgacttggttgcatccagttttcccgtttctgccaaactgggagccgcagcatttttccttgcggtaatactgggtgttagtgctggcgttattgccgcattaaaacaaaacaccaaatgggactataccgtgatggggctggcaatgaccggggttgttatccccagttttgtggttgcaccattattagtcatgatatttgcgatcattttgcattggctgccgggcggtggctggaatggtggggcgcttaaattcatgatattgccgatggtggcgttgagtctcgcttatatcgccagtattgcgcgtattacccgtggctctatgattgaagtattacactccaattttattcgtactgcccgggcgaaagggttacctatgcggcggatcattttacgtcacgcattaaaacctgctctgttacccgtgctctcttatatgggccccgcatttgtcggcattattaccggttctatggttatcgaaaccatttatggtttgccggggattggacaactgttcgttaatggcgcattgaaccgtgactattccttagtgttaagcctgaccatcctggttggtgctttaaccattttgtttaatgccattgtcgatgtgctatatgcggttatcgacccgaaaatccgttactgatactggagctcgcgatgatgttaagtaagaaaaacagcgagacgctggaaaatttcagtgaaaagctggaggtcgaagggcgcagcttgtggcaggacgcacgtcgacgttttatgcataaccgtgcggcggttgccagtctgatagtgctggtgctgatcgcgttatttgtaatcctggcaccgatgctttcccagtttgcctatgacgatactgactgggcgatgatgtccagcgccccggatatggagtccggtcactactttggtactgacagttccggtcgcgacctgcttgtgcgcgttgcgattggcgggcgtatcagtctcatggtcggtgttgctgcggcactggtggctgtggtcgtcgggacactttatggtagcctttccggttatctgggcggtaaagtggatagcgtaatgatgcgtctgctggaaatcctcaactccttcccattcatgttcttcgtcattttgctggtgacctttttcggtcaaaacatcctgctgattttcgtggcgataggcatggtttcctggctggatatggctcgtattgtgcgtgggcaaaccctgagtctgaagcgcaaagagtttattgaggcggcacaagttggcggtgtaagcacaagcggcattgttattcgccacattgtgccgaatgtactcggtgtggtggtggtctacgcaagtcttctggtgcccagcatgatcctctttgaatctttccttagcttcctggggttgggtacgcaagagccgttaagcagctggggtgcattgctgagtgatggcgcgaacagcatggaagtctctccatggttattgttgttcccagcgggattcctcgtggtgacgctgttttgtttcaactttatcggcgatggcttgcgtgatgccctcgacccgaaagatcgttaaggagtgcagccatgagcgtaattgaaactgcaactgtgccgctcgcacaacaacaggctgacgcactgctgaacgtgaaagatttgcgtgtcacctttagtaccccggacggcgacgtcacggcggtcaatgatttgaatttttccctacgtgccggagaaacgctgggtattgtaggtgagtctggtagcggtaaaagccaaactgcatttgcgttgatgggcctgttggctgccaacggacgtattggcggaagcgcaaccttcaatgggcgtgaaatcctcaatttgccagagcatgaactcaataaactgcgcgctgaacaaatcagtatgatttttcaggacccaatgactagcttgaatccctatatgcgcgtcggtgagcagttgatggaagtgctgatgctgcataagaacatgagcaaagctgaggcgtttgaagagagcgtgcggatgctcgatgcggtaaaaatgccggaagcgcgtaaacgcatgaaaatgtacccgcacgaattttctggcggcatgcgtcagcgagtcatgattgcgatggccttgttatgtcgacctaagctgctgattgcggatgaaccaacaactgcgctggacgtcaccgtacaggcgcagatcatgacgctattaaatgaactgaagcgggaatttaataccgccatcattatgatcacccacgatcttgtcgtggtggcggggatctgcgacaaagtgctggtaatgtacgccgggcgcacgatggaatatggcaacgcgcgcgatgtcttttatcaacccgttcatccttattctatcggtttgctcaacgcggtgccgcgtctcgatgcggaaggtgaaacaatgttgaccatcccgggtaatccgccaaacctgctgcgattaccgaaaggttgcccgttccagccacgttgtccgcatgcgatggaaatttgtagtagcgcaccgccgctggaagagtttacgcctggccgtctgcgtgcttgctttaaaccggtggaggaactgttatgaatgctgtaactgaaggaagaaaagtcctccttgaaatcgccgatcttaaagtgcactttgaaatcaaagatggcaaacagtggttctggcaaccgccgaaaacgctcaaagccgtcgatggtgtcactcttcgcctgtatgaaggggaaacattaggtgtggtaggggaaagcggatgcggtaagtccacctttgctcgcgccatcatcggtttggtcaaggcgaccgacggtcatgttgcctggttaggtaaagagttgctgggcatgaaacccgatgaatggcgtgccgttcgcagtgatattcagatgattttccaggatccgttggcaagcctaaacccgcgtatgaccatcggcgagatcatcgctgaaccactgcgtacttatcatccgaaaatgagtcgccaggaagttcgcgagcgcgtgaaggcgatgatgctgaaagtcgggttattgcctaacctgattaaccgctatccgcatgagttctctggtgggcagtgccagcgtatcgggattgcgcgtgctcttattcttgaaccgaagctgattatctgtgatgagccggtgagcgcgctggacgtgagtattcaggcacaggtggtcaacctgctccagcaattgcaacgtgagatgggattgagtttaatttttatcgctcatgacctggccgtggtaaaacacatttccgatcgtgtgttggtgatgtatctcggccatgcggtagaactggggacctatgatgaggtctaccacaatccactacatccttacaccagggcattgatgagcgcagtccccatacctgatccggatctggagaagaacaaaaccatccagttactggaaggggaattaccgagcccgatcaacccgccttccggttgtgttttccgtacccgttgcccgattgccggtccagagtgcgccaaaacacgtcctgttctggaggggagtttcagacactccgtttcttgcctgaaagtcgatccgctttaaaaacaataagggctgacagttgtcagccctttttcacgctaaaagcgattatttattcccgccagatgatatggcaaagtttgtgatctttttcgcggcataacagaatgcgggcaaaaacatcgttgatttcaccatcttcactgtccgccagaccaatcaccacttcggcaaaaaagtccgggttcaaatcgaaatcaacatgttcctgccagtcttccgccggatcgaataactccgcgccgccgcgctcttcaaactgaagattgaacagcagaacatcagctggatcgagattgtcggcagccagttcgagaaaaatatcgtaggcctgttcaagcgtttcatcttcagtcaggcgattgtttagatccatatccatagttactacctgtttaacctctgttggcgacgttttacagcaacggactgaagaagtaaaacagtcgctcggcgacacgttgccataatggacgttttagccataaacgggcatcgagcagacgactacggctaatataatcgtcctgaacggcggcgaggtcagcaccaaaacctttatcgtcgattgccagggtaatctcgaaatttagccacagactacgcatatcaaggttaactgtgccaaccagacttagttcgccatcgaccagcacgctcttggtatgcagtaacccgccttcaaactgataaattttaaccccagcagccagcagttccgtaaagaatgcgcgactggcccagccgaccagcatgctgtcattttttcgcggaaggataatactgacatccaccccgcgctgcgccgccgtgcaaatcgcatgaagtaaatcatcgcttggcacaaagtagggcgtggtcatgatcaaatattcacgcgcgctataagccgcagtcaataatgcctggtgaatgagatcttccggaaagccggggccagaagcaattgtgtgaatggtgtgaccgctggcctgttcaaacggcataatattgacatctggtggtggcggcagaatacgttttccggtttcaatctcccagtcgcaggaataaataatccccatcgcggtggcgatagggccttccatacgcgccatcagatcaatccattgccctacgcccgcatcttgtttgaagtagcgaggatcgaccatattcatgctgccggtgtacgcgatgtaattatcgatcatgatcatcttgcgatgttggcgcaggtccatacggcgtaaaaacacacgcatcagattgacctttaaggcttcgaccacttcaataccggcattacgcattagctcgggccacgggctgcggaaaaaagccacactcccggcggagtcgagcatcaatcggcaatgaatgccgcgtcgcgcagccgccattaaactttcagccacctggtccgccatgccgccgggctgccagatataaaacaccatctcaatattatggcgcgcgagctggatgtcgcggattaacgcctgcatcacatcatcactctcggtcatcagttgtagctgattccctttgaccccagcgatcccctgacgacgctcgcaaagcttgaataatggcgcagcgacactgctattttcttcggcgaagatatgcttacaggctttaaggtcgttaagccattttgcggtggaaggccacatcgctctggcgcgctcagcgcggcgtttgcctaaatggagctcgccaacggcaagataggcaataattccgactaacggcagaatgtaaataatcaacagccaggccatcgcggagggaactgcgcgtcgtttcattagaatgcgtaaagttacgcctgcaatgagcaaccagtatcccagaatggccaaccaactcaccaacgtataaacggttgtcatagattagaaatccttttgaaagcgcattgttatgagtttacgcatatggattcatctggcaaataaaaacgcgggaaaagcactggtcagcgtcgggggtgggggtataatgaccattctgttattgcatagagtagttaacatgaagcggagtagaacggaagtggggcgctggcgcatgcagcgtcaggctagccgacgtaaatcgcgttggcttgaggggcaatcgcgccgaaatatgcgtatccacagcatcaggaagtgcattctaaacaaacagcgtaactcgttattgtttgcgatctacaatatctaaatgtactgggcaccattgcggtgcccaataagtttactcttccgtctttaaactttatttttgcgcgctttctttactgtcagctttcgtttctagttcatcgttatcgctgaaaataccatgaccactgttcaacaacatactaacgagcatatcattattaatctcttcaccatttaaaactcgcgccagaatttcgctgccaaacagttgcggactgagaatgatatccggatgtaccatcttaatcttattcaggtttttgctatcactgacggcgagaactgttttgacatcactgctcatatcttttgcgctgagtacaacaaacgcgttatctgcatcgttatcactcagcgccagaatggcccggcaacgatcgattcccgctttctttaatacagaactgtcattactgtcaccggggataacatcagcattatcgcctaagcgttgctcaagttgcttgatatcatcttcaggcaagttgctgataaccgttacgttttgtccgcgttgattcagttgcaggatcgtattgatggcgagaatgctatgtccgcaaacaataaaatgatctttacgatgcattgtatgattgtttccttttacaagtttgttgaatcccccgcggataagcggaccaaaaatactggtcatagatgtggcaaaaacggtaatgccggaaataatgacgctaatagtgaacaatcgtgcactttcagaaacagggacaatatcgccatagccgacggtactcatggtttctatgctaaaatagaacgcggtcatcaaactttctattcgcggattaaaaccttcgcttaaataaagcgcaccgtaggtactgtaaaacagtaatgtcgtgaaactaataaatgcaaaaattgtcccggctgcggcgctactgtgggagaagtctttgcgcagtatcagcaaaaacaccagcgtaaaaatgcaaaatccaatactaaatttcagccagggataaaaatgcagggtgtaaattagcgctatcaacaacaaaatgatactgattgcccatgcgagctttgcccggaacagtaagccaatggagttcaggacaagaaagacgccgagcataaagagtggggcgtttgccagcaaggagagatccaactcactaaatgctttgatatggaaaatatcaagcaaattgacgctcataccatagattgttttaaaaataagcaatccatttaaaaagacggccagcgcgagaatgtcgtgccgaagggtcacccataaatttgttgctgtttgtttgaatgtagcccagtgactcactgatacctctgtaaccacaattttgtttaattatcttagcgtgcacattttctgaacatacatgcagcgcgtgaatgtgttaaacaatagtagatgactttatccgcagtaatcaaaggatttgagcgagcaactgtacctcaggaaaggtcatttttcctgaatatgctcacatcatataaagaaatacagataaagttattatctgcttgtggtggtgaatgcactgaccggctataaggaaaggccaaacaagaacacggttgcaaaaaccgtgcccttaaatattgaatctctattcagaacactttcttaaatggtttcacactaacgtgttcatagactcctgccgctacgtacgggtcagcatcggcccaggcctgagctgcttccaggctttcaaattcagcaataacggtactgccagtaaatcccgcagcccctggatcgttactgtctaccgctggcattggaccagctgtcaacaaacgaccttcatcatgcagtaactgtaaacgtgctaaatgtgccggacgaacggaaaggcgtttttcgaggctatcagctttgtcttgagcgtaaataacatacaacacgggcacaactccttgttcgggaaagttgtaaagtacgttatttgaaagggcgaagatctgcaacggaaagatgatgtctttgttaaggccatgcataaagtaagggtaattacgccaaaaatgacattttcactgatcctgatcgtcttgccttattgaatatgattgctatttgcatttaaaatcgagacctggtttttctactgaaatgattatgacttcaatgacccttgatttacctcgccgcttcccctggccgacgttacttagcgtctgcattcatggtgctgttgtggcgggtctgctctataccagcgtacatcaggttattgaactacctgcgcctgcgcagccgatttctgtcacgatggttacgcctgctgatctcgaaccgccacaagccgttcagccgccaccggagccggtggtagagccagaaccggaacctgagccgatccccgaaccgccaaaagaagcaccggtggtcattgaaaagccgaagccgaaacctaagccaaaaccgaagccggtgaaaaaggtacaggagcagccaaaacgcgatgtcaaacccgtagagagccgtccggcaagtccgtttgaaaatacggcaccggcacgcctgacaagtagtacagcaacggctgcaaccagcaagccggttaccagtgtggctagtggaccacgcgcattaagccgtaatcagccgcagtatccggcacgagcacaggcattgcgcattgaagggcaggttaaagttaaatttgacgttacgccggatggtcgcgtggataacgtacaaatcctcagtgccaagcctgcgaacatgtttgagcgtgaggtgaaaaatgcgatgcgcagatggcgttatgagccgggtaagccaggcagtgggattgtggtgaatatcctgtttaaaattaacggcaccaccgaaattcagtaagcagaaagtcaaaagcctccgaccggaggcttttgactattactcaacaggtaaggcgcgaggttttccttcaggatcaaccgcgacatacttaaataatgcttctgtcgctttatagcgttgcccaattggttcagacgctacttttttcacccacacttcaatattaatgctgacgcttgtcgtccctttctggacacagcgtgcatagcagcacaccacatcgccgaccgcaaccggccgtaagaaagtcattccttcaacccgcacagtcactacgcgaccgtgggcaatttcttttgccagaatagcgccgccaatatccatttgactcattaaccaaccaccaaagatgtcaccattggcattggtatcggcgggcatggctaaagtacgtaaaacaagatcgccctgagggacgttatgtgttgtagacatggtaaaaccgacttaaaaggaaaatcacaggcgcgatgctactatgattttcctgaggagaacagaggagatacagcgccagccccgaaggactggcagtctggttaggatttatcttcctgcggcatgtggcggtagatatagataccgcttaacaatgtgaagattaaggtaagggcggtcaggccaaagactttaaagttgacccaaatattttgcggcagccagaatgcgatgtagatgtttgccagaccgcaaaggataaagaaaacagcccaggccagattcagcttgctccataccggttgcggcagcgtgagttctttacccagcatccgctgaattagcggctttttcatcacccattggctgactaacagggctcccgcaaatagagcataaatgacagtaaccttccatttaataaactcatcattgtggaagaacagcgtcaagccaccgaagacgaccaccagaacaaaagtgatcagggccatcttctcaaccttacgaaagcgaacccagctatagataagcacaatcgccgtggcgacgatcagcgccgcagtagccgcatagatgtcataaatcttgtaaaacgcgaaaaagacaaccagcggtaaaaaatcaagaaactgcttcattttacgattccgtaatcaaatgcttaaggttattggcgaatcaacatatacaggcggaacagatagatgagcaatatggcactaatcaggttgctcaaggtgttcgccagtacggcaccaatttccggggttaatgcggcaaaagaagaggcaaaaagcagcaacagtgtttttgccagcaaccagctcagtactgcgggtgccaccagacgcatattcgcccaagtcagccgcatactgctacgcatgctggcaaaaacgcccattttgtcctgtaccaacatcaccggtgccagggccagtaaaatggccatgataattcccggaacgaccaccagcatgatgccaatctgtactaaaagggtagtcagaaaaatcagaataaataactttggcaatatcggcgcactggcaccaatagctcgcagcgcactgactctctgacccgcagacaccagctggataattaatattacgcctccggcgagaatggcgttaccgattaatccactaaaagtggacgccgcactagcctgcagcaaaatttgttgctgttccggactcatattctgaaccaggtcgaacaacccactactgccgctaacgggcacgccgtcattgagctgcgcaagctgtgcatcactgggactgaaaacatgccctaacaccactgtgataaacgcacatagcaagcttaccaacagaatggtcataaattgattacggaagaaatttccggtgtcacggtatacggactgcgccgtgatagacatgcactctccttgagttttatgcaggtgttaattagcgggcaattgtaccctggttaagcctcgggtggcagcatcaggtcttgtatggaaaagcatatctttgtaaagcggaggtaattgctggccttcaggcatgggcaaatcgcggcaagtggcgaccgagttaatatttgcgtagcgaaaatatttaaaaattgatttaaatcacattaaccaggattctcaatgcaacttctaaattaatccagatcaataaagggtgaattatcatatgtaatgtgatctatgtaggatcatttgttactccaatgtaggtatattcgtcacgtttttataaccataacgacggagcggatatgaaaaagttaacagtggcggctttggcagtaacaactcttctctctggcagtgcctttgcgcatgaagcaggcgaattttttatgcgtgcaggttctgcaaccgtacgtccaacagaaggtgctggtggtacgttaggaagtctgggtggattcagcgtgaccaataacacgcaactgggccttacgtttacttatatggcgaccgacaacattggtgtggaattactggcagcgacgccgttccgccataaaatcggcacccgggcgaccggcgatattgcaaccgttcatcatctgccaccaacactgatggcgcagtggtattttggtgatgccagcagcaaattccgtccttacgttggggcaggtattaactacaccaccttctttgataatggatttaacgatcatggcaaagaggcagggctttccgatctcagtctgaaagattcctggggagctgccgggcaggtgggggttgattatctgattaaccgtgactggttggttaacatgagtgtgtggtacatggatatcgataccaccgccaattataagctgggcggtgcacagcaacacgatagcgtacgcctcgatccgtgggtgtttatgttcagtgcaggatatcgtttttaattccgcacaaaaacgaccccgtaatatacggggtcaataaggacatggtataaagggtattatttcttcgcttctacgccatcagtttcagagcgaattaaaaatttctcagttgtttgcggaatattctgaatcagccagtcggccatttgcttttcctcatttaaaatcgcttcgatggttggaatactagctgtatcaccggcattttttgctgctgctaatagactggtgtaacaggcgatttcaaattgctcgaagacatatccgctaatagagcctttgactatttcatcagaagggaatataccaccgatactctgcccaagcgcagccattttactcatggaatctttaatgacactacgactaatgtcattacgatcaagaatagtttccagttgaacaatctggtttttggtttcactaagatgttgttcaatacgagcgcgtagttcaggataattatctatacggctggccatggattcaagcatagattcggcttgcttttccattgcgtgggcgtcacgtaaccagtcatgataatgttcaatacgattcatgaaaatgtcctctttataaaatgactaaaagttaaaattcatatttcaggctttattttcggctttcttatttacgttattaatggccagatcagtcagtttgatgtcggtggccttttcttcttccagggtttctttcagaagcttcgctgctttacggtaacctaattgttcagccagcgtcgctaatgtcccgtaactggcaatctcataatgctcgactttctgtgctgcggcaatcagtgcggcatcacgcacttcgtttttctcggtactttcgatgacctcattagcttcttcaataagaccttccattgccacacatttcatgcgcttaattttcaggttgctttcggactccacaacttgatcaatacgttcaatctgtccatgagtttcctcgaggtgcgcatgaaaagcctgacttaatttttcattacttgttgctcttgcgagttttgccagtgcccgggttaattgtttttctgcgctgtaggtatcactaagcaggtgaataaatacatcttcaatggtcttcatattcatatttttctccagtgaaatcactgcgagccatacggcccgcagatgcaattatctttatcagctgatattaataattaacggtgaatcaggatttgccacttttattaccaccgctttgttgaccgccttttttacccgcttcagatgcgcgttgcggatcatttttaaaattaccgccgctatgctgaccgcctttacggcctgcgtcggatgccttctcacggtcttcggcgaaatttccactaccaccacgatgttcggccatgttatttctcccgttgcgttgcattgtttcattaatatgagtgttgtgtgtcgacactcattaaaattagtcgctaatgagaattagtcaaattaagcgcaacgagaagatagagggaaaatatattttgaggaacattctggatatattaacaattacctgaggaataagtgacttagagaaaattattgattttactggtgttatgttgcgggattaatttgtttgattatattactgttgggcggaaaaatgacgtaagttgacgttcgaccggggtaagcgaaacggtaaaaagataaatattaaatgaatttaggatttttccggcttcattaaagaaagttaaaatgccgccagcggaactggcggctgtgggattaactgcgcgtcgccgctttcatcggttgtacaaaaactttcagtgccgccagcattttctctggctcattaatatgttgctcgatgattttaacaatggcgctaccagaaatcgcgcccgcagctcctgcatcaatcgctgcttttacctgatccggggcggaaataccaaatccctgcaatggaggtgcagcgttgtactctttcagcttcgcaaccagatgattgaggggtaacgcggcgcggttttctgcgccggtcacgcctgctcgactcagcaaataggtgtaaccacgaccgtaagaggctatctggcgcagcaggtcgtcatcggcatttggcgggcagatgaagataggtgcgacattatgacgcaacgcggcctggcggaagggcgcggactcttcaactggcacatcggcaaccagcacgctatcgacgccgactttttcgcactgggcataaaactcatcaatgcctttgttaaacaccagattggcatacatcaacaggccaatgggaatggtcgggtgtttctggcgaatcagtgccagcatttcaaaacattgtgccggagtcacacctgccgcaaaggcgcgcagagtggcgttttgaatcgtcgggccatccgccagtgggtcggagaaggggatacctaactccagcgcgtcagcaccggcttcaattagcgtatcgataattttcaaactctgctcaatgcccggatcaccgagcgtgacgaaaggaacgaatgcgccttctttgcgctccttcaactgggcaaacagagattcgtagcgttccatcagatttcccctcgtgctttcaaaatatcgtgaacggtgaagatgtctttatcgccgcgaccggaaaggttaaccaccagtagctgctctttatccgggttttcgcgcatcattttcaacgcatgggccagggcgtgggaggattccagcgccgggatgatcccttcgtgcaggcacagcgttttgaaggcttcaagggcttcatcatcggtaatagacacgtaatcagcgcgtccagtgctgttaagatacgcgtgttgtgggccgacagacgggaaatccagtccggcggagatggagtaagattcttcaatctgcccgtcttcggtttgcatcatcggcgctttcataccgaaatagatacccacgcgaccatgttttagcggtgcgccgtgctcgccagtttcgataccgtgaccacctggctccacaccaatcaggccgacgttggtttcattgatgaaatcagcaaacatgccgatggcattgctaccgccgccaacacaggcgataacggcatccggcaggcgaccttctctttccagaatctgcgctttggtttcttcgccaatcatccgctgaaactcacgcacaatggtcggataaggatgcgggccagctgcggtgcccagcatatagtgcgcggtttcgtaactaccggaccagtcgcgcagcgcctcgttacaggcatctttcagcgtcgcggaaccgctatgcaccgggatcacttccgcacccattaagcgcatacgaaaaacgttagggctctggcgttcaacgtctttggcacccatataaatacggcatttcaggccgagcagggcgctggcaagggcgctcgccacgccatgctgaccggcaccggtttcggcgatgatttcggttttacccatccgcttcgccagcaacgcctgccccagcacctggttagttttatgcgcgccgccgtgcagcaaatcttcacgcttgagatacagcgtggtgttcgtcccggctgtaatgttctggcatttggtcagcgcggttggacgcccggcatagtttttcagcaggtcgttgaactgagcctgaaattcaggatctttttgcgcactgacaaaagcttcttccagctggcgcagagcaggcatcaggatttgtggcacgtacatgccgccaaactcaccaaaataggggttaagtaatgttgtcattgttcctttccttaatatgcgcgcagcgtctggaaaacgctggccaaaagacgtgcgtctttgatgcccggttggctctctacagcagaattaaaatcaagtccggcgcagccggtttgtgccgcttccacgcagttatctgcgcctaagccccccgccagcagaacgttgccaaggctttgaccatttaatagactccagtcaaaacgttgcccgcttccaccctggccgttgtctaaaacatatttatcaacgtgctgaaactcgcgggcgggcagggtttcaccgacgcttaatgctttccagatggcaacatgtgctggcagagcttcacgcagcgtatcgatatacagctgttcttcattaccatgcagttgcactgccgccaggcttaacaccttagctttgtccaccacatcggcaatatcgtgattgcggaacacgccaacatactgcaacggtgccgcagccatcacttcctgcgcctgttcaacgttgacgcaacgcggacttgtcgcaacaaaaatcaacccaccgtaaatcgcgcccgcgtcataagctgctttagcatcttgcccacgcgtcaggccacatactttattctcacccagcaacacccggcgcacggcggcgtgcaaatcgtcatgggccatcaacgcgctaccaatcagaaaaccgttagcgaagtggcttaactcgcgcacctgagcgtaagtattgatgccggattcgctgattaccgtcacgttgtgccccagtttcggcgcaagctcgcgggtacggttgagatcaatgctcaaatcacgcagatcgcggttgttgatgccaacgacctttgctcccaatgcaatggcgcgctcctgttcctcttcattactgacttcggtcagcacccccatctccagactgtgagcgacggcggcaagctggcgatattggtcgtcatccagtacactaagcattaataagcaggcatcggcctggtaatagcgcgccagatagatctggtaagggtcgataatgaagtctttacataaaatcggctgcggggcgatttggctgacgatggggaggaaattaaagctcccctgaaaatatttctcatcagtcagcacgctaattgcgctagcgtaatgtttataaatggcggcaatgcgtgctggatcgaaatcatcacggatcacgcctttactcgggctcgctttcttgcactccagaataaacgccgtgcgcgcaccctgtagcgcatcataaaaatgtcgcgtgctcggctgaacctcattctgaaaactggccagcggttgctgctgtttgcgggcttctacccaaatcgccttgtctgcgacgattttcgctaaaacggtttgcatcatttaccctcgtgccgccagtgcggtgactctgtcgtaagcggaaccactgcgcagtacctcaagaacggtttgcgcattggcttgcagatcttcatggccatgcaggcgcattaacatggcgacgttcgcagcgacggctgcttcatgggcggcgtcgcctttaccttgtaacaaacgtgttaaaatgtcacggttttcttccggtgttccgcctgccagttgctcctggtggtagggtgtcaggccaaagtcttctgcggtgagctgatagcttttaatttcgccgtcatgcagttcggcaacgattgtcggcgcgtgtaaactaacttcatccatcccgccgctgtgcaccaccgccgcgcgttgataccccagcacgcgcaaggtttcggcaatcggcagcaccagttccggactataaacaccaattaacgccagcggcggatgcgccgggttaatcaatggccccagcacattgaacagggtgcgggttttcagttgctggcgaaccggcatcgcgtggcggaatccggtgtgatacttcggcgcaaagaggaaacatacacctaactcatccagcgcctggcggcttttatcggcgttcatatcaagattaataccgaacgccgccagcagatcggagctaccagatttactggagacgctacggttgccgtgtttcgccactttcagcccacaggccgcggcgacaaacgcactggcggtagaaatattgatactgttgctgccgtcaccgccagtaccgacgatatcagcaaacagataatccgggcgcgggaacggcgctgcgttttccagtagcgcggttgctgccccggcgatctcgttcgggtgctcaccgcgaattttcatgctcaccagcgccgccgccagttgttccggcttcagctcgccacgcaccaccgcactaaacagctggtggctttcttgttggctaagcgtctgcgcctgatacagtttttccagaatcggttgcagcgtgttggctggctctagtttctgctgcgcccaggccagcgtttgttccagcaggcgagcgccctgggtggtgagaatggattccggatggaactggaatccacaaacgcgatccgcatcgtgacgtactgccatcaccatgccattaaaatgggcgttgatggttaaaccggccggaatgttactgccaaccaggctgtgataacgcgccaccggcagcgggtttgttaatccggcaaacatcgcctgaccgtcatgttcaatgctggaggctttaccgtggagaatttcgcccgcctgaccgacatagcccccgtaagcttcgacaatcgcctgatgtccgaggcaaatgccaataatgggcagcttgccacgcaagcgggtgaggagttccggcatacaaccggcttcgctcggcacaccggggccaggagaaagcatcagcaccggattgctcatggtcgccaggcgttcaattaaggtttgcgccggaatatggttgcggtaaatcaccacgttatgcccattgctgcgcaactgatctgccaggttgtacgtaaaagagtcgatattatcgagcagcagaatgtcagccatcagaaagtctcctgtgcatgatgcgcggtggcaatagcgcgcagtacagcgcgggctttgttacgggtttcgtcggcttcgctctgcggaacagaatcaaggactacaccagcacccgcttgcacggtggcgataccgttttccaccagcgcgctgcggatcacaatgcaggtgtcgagatcgccatgcgcggtgaaataacctaccgcgccgccgtagctgccgcggcgacgaccttccgcctcggcaattaactgcatagcgcgtactttcggcgcaccgcttaacgtccccatattcatacaggcgcgataagcgtgcagggcgtcaagatcgtgacgcagttcgccgactacgcgagagacgaggtgcatcacataggaataacggtcaactttggtgagatcggcgacgtagcggctgccgggggtgcaaatgcgtgccagatcattacgggcgagatcaaccagcatcagatgttcagacagctctttatgatcggtacgcatttccagttcaatacggctgtcgagatctctgtccagactaccatcggcgcgacgaccgcgtgggcgtgttccggcaatcgggtagatctcaatctggcggctggtggcatcatacttgaggctgctttccgggctcgcgccaaatagggtgaaatcattatcctgcataaaaaacatgtacgggctgggattactctttttcagcacgtaataggccgccagcggactcgggcagggcagagagaaacggcgagatggcaccacctggaaaatttctccagcgcgaatcgctttttgcaacaaacgcactacgccaccgaactcttcatcgctctgattacattcacaacgcatatgcggcacggaaaccactggcagcggcggcgcggcttcggtcagttgctgacgtagttcgttcaggcgagcagtgagacgttgtttttcttcttcattcggagcaaacaggctggcctgaatacgggtgctttttttctgatggtcaatcaccatcagcgtttcagcgagataaaaacagaaatcagggcagttattttccgcactcagttgcggtaaatcttcaaatcccgccacaaggtcataagagaacaggccgccgaagaacatggcttctcgttcttccttcggtacattcaacagattctgcaataaacggaaagcgtcaaaaacgctaagggagcataagcgggcgtcttcatccagcagtggactgacaggggggaagcgcagcacacggcagtttggactttgttcactttccacacccgcaggcagggcgttatccagtagtgccaggagggcttcgccgttgccggaaagtgcctggattgtgacagtgtcacctaaagctgtaatgcgcagcgcactgtctaccagcagcaggctttttaaatcatctttgctgtcgatatctgcggattccagcagcagcgttgccggacgatccccacacaactggtgaaaaagcgcggtgggattgtcgcgataagcgccttcgcaggttagcagttcgagagtcggtttttgtgtttgcattgttattctctaattttgttcaaaaaaaagcccgctcattaggcgggctgggtatctgattgctttacgcatggtgaatacactgcccgtttcaggaagtgcgccaccaacctttcagtacgaaaattgctttcattgtcgataccctttttacgtgaacttgcgtactagttaactagttcgatgattaattgtcaacagctcatttcagaatatttgccagaaccgttatgatgtcggcgcaaaaaacattatccagaacgggagtgcgccttgagcgacacgaattatgcagtgatttacgacctgcacagccataccacagcttccgatggctgcctgacgccagaagcattggtgcaccgtgcagtcgagatgcgcgtcggcaccctggcgatcaccgaccatgacaccacagctgcaatcgcgccagcaagagaggaaattagtcgtagcggactggcgttgaatcttattcccggcgtggaaatttccacggtctgggaaaatcatgaaattcatattgtcgggctgaatattgatattactcatccgctaatgtgtgagttcctcgcgcagcagacagaacggcgcaatcagcgggcgcagctgattgccgaaagacttgaaaaagcgcaaatacctggggcgctggaaggcgcacaacgactggcgcagggcggcgcagtgacgcgcggtcattttgcgcgtttccttgttgagtgcggcaaagccagtagtatggcggatgtctttaaaaagtatctggcgcgcgggaaaaccggatacgttccgccacagtggtgtacaatagaacaagctattgatgtcattcatcattctggcggtaaggcggtgctagctcatcctgggcggtacaatcttagtgctaaatggctgaaaagattggttgcgcattttgccgaacaccacggtgacgcgatggaagtcgcgcagtgccagcaaagccccaatgaacgtacccagctggcggcccttgcgcgtcagcatcatttatgggcaagtcaaggatctgattttcatcagccatgcccgtggatcgaactgggtcgtaaactctggctgcccgcaggcgttgaaggcgtctggcagctatgggaacagccgcagaacaccacagagagggaattatgagccagtttttttatattcatcctgataacccacagcaacgtctgatcaaccaggcggtggagatcgtgcgtaaaggcggggtgattgtttatccaactgattccggctatgcgctcggctgtaaaattgaagataaaaacgcgatggagcgtatttgtcgtattcgccagctgccggacggtcacaactttaccctgatgtgtcgcgatctttctgaactcagcacctatagttttgttgataacgttgcgtttcgtttaatgaaaaacaacacgccgggcaactataccttcatcctgaaggggacgaaggaagtgccacgccgtctgttgcaggaaaaacgcaaaaccatcggtatgcgtgtgccttctaaccctatcgctcaggcgttacttgaagcattgggcgaaccgatgctttccactagcctaatgctgccaggcagcgaatttaccgaaagcgacccggaagaaattaaagatcgtctggaaaaacaggtagatttgattattcacggcggctatctcgggcagaaaccgacaacggttattgatcttaccgatgatacgccggtcgtggtgcgtgaaggcgtaggtgatgtgaagcctttcttataacaaattgcgttccacggatggaagactatggcagggaagtttcgctgcattttgctgttgatagcagggctgtttgtaagttctctaagttatgcagaaaacacggagatcccttcttatgaagaagggatcagcctctttgatgttgaagccactctgcaaccagatggggtgctcgacatcaaagaaaatattcattttcaggcgcgaaatcagcagattaagcacggcttttatcgtgatttaccacgactatggatgcagcctgatggggacgctgcactgctgaactatcatattgttggcgtcacccgtgatggtattcctgaaccctggcatcttgactggcatatcgggttaatgagtattgtcgtgggcgataaacaacgtttcttgcctcaaggcgactatcattatcaaattcattatcaggttaaaaatgctttcctgcgtgagggggattctgatctgctaatctggaacgtgaccggtaaccactggccgtttgaaatttataagacccgtttttctctccagttctctaatattgcgggtaatccatttagcgaaatcgatctttttaccggagaagagggcgacacatatcgtaatggccgcatccttgaggacggaagaattgaatcccgcgatccgttttatcgtgaagatttcacggtcctctaccgctggcctcacgctttacttagcaatgccagcgctccgcaaacgacgaatattttcagccatcttcttttaccctccacgagtagcttgttaatttggtttccgtgtctgttcctggtttgtggatggttatatctctggaagcgcaggccgcaatttacgccggtagatgtgattgaaaccgatgtcattccgccagattacacgcccggcatgttacgtctcgatgcgaagctagtttacgacgataaaggtttttgtgccgatatcgtaaatctgattgtgaaaggaaaaattcatctggaagatcagtctgacaagaaccagcaaatcctgattcgtgttaatgaaggcgcgaccagaaataatgcggtattactgcccgcagagcagttattactggaagcgttatttcgtaaaggcgataaggtcgttcttacggggagacgcaacagagtcttacgcagggcatttttacggatgcagaaattttatctgccgcgtaaaaagtctagcttttaccggtctgatacttttttgcaatggggtggactggcaatattggcggtcattctttacggtaacttgagtcctgtaggctgggcaggaatgagtctggtgggcgatatgtttattatgatctgctggattattccttttttattttgttcccttgagcttttgtttgcccgcgatgatgacaagccttgcgttaatcgtgtaatcatcactttgtttttaccactgatttgtagtggcgtggccttctattctctctacatcaatgtcggagatgtattcttttactggtatatgccagcgggttattttaccgctgtttgcctgaccggttatctcactggcatggggtatatttttctgccaaagtttacccaaactggacagcaacgttatgcccacggtgaagctatcgttaactatcttgcgcgtaaagaggcagcaacacacagtggacgtcggcggaaaggggaaacacggaaactggattacgcgttgctaggttgggctataagcgcaaatttggggagggaatgggcgttacgcattgcccctagcctttctagcgcgattcgcgctccagagattgcccgtaacggcgttttattcagtttacagacgcacctaagttgcggggccaataccagtttgttggggcgaagttattccggtggtggtgctggcggcggcgcgggtggcggaggcggtggtggctggtaattaagctgatgttaatcgaaacaagctttaaccataaagatagtgtagtatgttgcgcctcaaagccaggccgataaacgtcgagtcgtttacttaaggcctgaagagttcaaacagactttactatcagtgagtcagatgtaagttctgactcactgttgcacaaaagcatatcagacgcctgggaaggcgacaccaaaaggaagctctatgagcgaaaagctacagaaagtgctggcgcgtgccggccacggttctcgccgtgaaatcgaatctattattgaagccggtcgtgtgagtgttgatggcaaaattgctaaactcggcgatcgtgttgaagttacccctggattgaaaatccgtatcgatggtcacctgattagcgtacgtgagtccgctgaacaaatttgtcgcgttctggcctattacaaaccggaaggtgagttgtgtacccgtaacgatccggaaggacgtccaacggtgtttgaccgtctgccaaaactgcgtggcgcacgctggattgccgtgggtcgcttggacgttaatacctgtggtctgctgctgttcaccaccgatggtgaactggcaaaccgtttaatgcacccaagccgtgaagttgaacgtgaatatgccgtgcgtgtatttggtcaggttgacgacgcgaaactgcgtgatttgagtcgtggcgtgcagttggaagatggtccggcagcttttaaaaccatcaagttcagcggcggcgaagggatcaaccagtggtacaacgtgactctgaccgaaggccgtaaccgtgaagttcgtcgtctgtgggaagcggttggtgtgcaggtgagccgcctgatccgtgttcgttacggtgatatcccactgccaaaaggtctgccacgcggtggctggacggagctggacctcgcccagactaactatctgcgcgaactggtggagctaccgccagaaaccagctctaaagtcgctgtagaaaaagaccgtcgtcgcatgaaggcgaatcagattcgtcgtgcggtgaaacgtcacagtcaggtgagcggcggtcgtcgttctggcggacgtaataataacggttaatcaaagtatgccggacgtcatatccggcatttttacagattaataatcgatccctatctgcgcttttacaccggcatcaaacgcatgtttgacggggcgtaattcacttaccgtatctgccagttcaagaatatcccgatgacaaccacgacccgtgataatcaccgtctgttgatgtggacgttcatttaacgcctgcaccacttcttccagtggcaaatagtcatacgccaccatatacgtcagttcatcaagcaaaaccatatccagactggaatcagcaagcatccgctttgcatgttgccagacttcgcggcaggcggcggtatcagactcgcggttttgtgtatcccaggtaaagcccgttgccatcacctgaaactcaacgccatgtggctccagcagattgcgttcgccattaggccaggtgcctttaataaactgcacgacgcctactttttttccgtgaccaactgcgcgtgttgccgtaccaaatgccgcggtggttttgccttttccattgccggtaaagacgatgataataccgcgttcatcctgggcctgggccacacgagcatctactttttctttcactcgctgctgacgctgttggtagcgttcatcactcattgggaaattcctggtttacggcccggttgggcgtcaaaggtcatgccggttttacggcggctgtcatcgcccatcagccagaggtagagcggcatgatatcagcgggtgttttaagtttctgtggatcttcggtcgggaaggcgctggcacgcattgcggtgcgcgtaccgcctgggttaatgcagttgacacgcaggcgctgctgatattcatcggccagtacctgcatcatcccttcggtggcaaatttgctcgctgcatatgcaccccagttggctcgtccctgacgtccaacgctactactagtaaagaccagactaccggcgtcgcttttgagtaataaaggaagcagtgcctgggtgagcataaaggtggcattaacgttgacctgcatgacgtcctgccagacctgcggattttgttcgctcattgggcaaacatcgccgagcaatccggcattatgcaaaacaccatccagacgcggataattaacggcaatgcgctgtgccagttgttggcaattttcggacgtgcaggtcagcaaatcgagaataaaccactgtggctgacgcccagtttcttcgtttatgtggctggctacctgacgtaatttttcttcattacggcccaacagaatcactgtcgcaccatagcgtgcatacgtcatcgcggcttcacgaccaataccatcgctggctcccgtcaccaggataatgcgatcattgagtaaatcttgttttggctggtaatgcatggctactcctcaacgacgttgtctgtcgcgctgccagtgtactttatgactttggggctttatgcctgaaacagaagggcatttcaatcagcctggggcgataacaccgcaaaatggatactttgtcatactttcgctgcaataacatctctgcgagacggcttaacatgcctgttgtaaactgtgagccaaagcgttgtttaaccaaggtggggactcgtggaattgttgtctgaatatggtttgtttttggcgaaaatcgttaccgttgtgctagcgattgcggcgattgccgccattattgtcaatgttgctcaacgtaataaacgccagcgtggcgagttacgggtcaacaatctcagcgaacagtataaggagatgaaagaagaactggccgcggcgctgatggacagtcatcagcaaaaacagtggcacaaagcgcagaagaaaaagcataagcaagaagcgaaagcagcaaaagcgaaagccaaactgggcgaggtggcaactgacagtaaaccccgcgtctgggtgctggattttaaaggcagcatggacgcccatgaagtgaacagcctacgtgaagagataacggctgtactcgcagcattcaaaccgcaggatcaggttgtgctccgtctggaaagccctggtggcatggtgcatggttacgggctggcggctagccaactgcagcgtctgcgcgataaaaacattcctttaactgttacggtagacaaagtcgctgccagcggcggttacatgatggcctgtgtggcggacaaaattgtttccgcaccgtttgctattgtgggttccattggcgtggtggcgcaaatgcccaactttaaccgcttcctgaaaagcaaagatattgatatcgaactgcacactgccgggcagtataagcgcacgctgacgttgctgggtgaaaataccgaagaagggcgggagaaattccgcgaagagttgaacgaaacgcatcagttgtttaaagattttgtgaagcgtatgcgtccttctctggatattgaacaggtggcaacgggtgaacactggtacggacaacaggcggtagagaaaggcctggttgatgaaatcaacaccagtgatgaagttattcttagcctgatggaaggccgtgaagtggtcaatgtacgctatatgcagcgtaaacgactcattgaccgattcaccggcagcgcggcagagagcgccgatcgattgttgctacgctggtggcagcggggtcaaaagccattgatgtaaaagacaaacgcgaggctaagacctcgcgttttgctttaatcaaccagatgatatttttcactaagcacatgggccaggtgtttgaacatattaaacaccgcggtgcttttggctgttggcaatccttgttcatctaaaaagtagtcgccggtaaataccagcacgccattacgctgcgtgacgccggtggcttcaatccctgcgagcgtatcctcatgctcacgaatgattttgttggcctctttcaacagcgtttcgcggtcgatgggttgtgtctctttgttcattatttactccttaaacaaggacattagtctacgccaggcatggcttgcagacaaatataccacgctggtggcaagagcgccttactggcaactttggattttgcatgctaataaagttgcgtatcggattttatcaggtacagtgtgacgctttcgtcaatctggcaatagatttgcttgacattcgaccaaaattccgtcgtgctatagcgcctgtaggccaagacctgttaactcagtcacctgaattttcgtgaacagagtcacgacaaggggttgatatccgcagagagcgagtccatatcggtaactcgttgccagtggaaggtttatcaacgtgcgacgcattcctggaagaatcaaattaggtaaggtgaatatgggtaaagctcttgtcatcgttgagtccccggcaaaagccaaaacgatcaacaagtatctgggtagtgactacgtggtgaaatccagcgtcggtcacatccgcgatttgccgaccagtggcagtgctgccaaaaagagtgccgactctacctccaccaagacggctaaaaagcctaaaaaggatgaacgtggcgctctcgtcaaccgtatgggggttgacccgtggcacaattgggaggcgcactatgaagtgttgcctggtaaagagaaggtcgtctctgaactgaaacaactggctgaaaaagccgaccacatctatctcgcaaccgaccttgaccgcgaaggggaagccattgcatggcacctgcgggaagtgattgggggtgatgatgcgcgctatagccgagtggtgtttaacgaaattactaaaaacgcgatccgccaggcatttaacaaaccgggtgagctgaatattgatcgtgttaatgcccagcaggcgcgtcgctttatggaccgcgtggtggggtatatggttagcccgctgctatggaaaaagatcgctcgtggcctgtctgccggtcgtgtgcagagcgtggcggttcgcctggtggtcgagcgtgagcgtgaaattaaagcgttcgtgccggaagagttctgggaagtcgatgccagcacgaccacgccatctggtgaagcgttggcgttacaggtgactcatcagaacgacaaaccgttccgtccggtcaacaaagaacaaactcaggctgcggtaagtctgctggaaaaagcgcgctacagcgtgctggaacgtgaagacaaaccgacaaccagtaaacctggcgctccttttattacctctacgctgcaacaagctgccagcacccgtcttggatttggcgtgaaaaaaaccatgatgatggcgcagcgtttgtatgaagcaggctatatcacttacatgcgtaccgactccactaacctgagtcaggacgcggtaaatatggttcgcggttatatcagcgataattttggtaagaaatatctgccggaaagtccgaatcagtacgccagcaaagaaaacagtcaggaagcgcacgaagcgattcgtccttctgacgtcaatgtgatggcggaaagcctgaaggatatggaagcagatgcgcagaaactgtaccagttaatctggcgtcagttcgttgcctgccagatgaccccagcgaaatatgactccacgacgctgaccgttggtgcgggcgatttccgcctgaaagcacgcggtcgtattttgcgttttgatggctggacaaaagtgatgcctgcgttgcgtaaaggcgatgaagatcgcatcttaccagcagttaataaaggcgatgctctgacgctcgttgaacttacaccagcccagcactttaccaagccgccagcccgtttcagtgaagcaagcctggttaaagagctggaaaaacgcggtatcggtcgtccgtctacctatgcgagcatcattagcaccattcaggatcgtggctacgtgcgagtagaaaatcgtcgtttctatgcggaaaaaatgggcgaaatcgtcaccgatcgccttgaagaaaatttccgcgagttaatgaactacgactttaccgcgcagatggaaaacagcctcgaccaggtggcaaatcacgaagcagagtggaaagctgtactggatcacttcttcagcgatttcacccagcagttagataaagctgaaaaagatccggaagagggtggtatgcgcccgaaccagatggttctgaccagcattgactgcccgacttgtggtcgcaaaatggggattcgcacagcgagcaccggggtattccttggctgttctggctatgcgctgccgccgaaagagcgttgcaaaaccaccattaacctggtgccggaaaacgaagtgctgaacgtgctggaaggcgaagatgctgaaaccaacgcgctgcgcgcaaaacgtcgttgcccgaaatgcggcacggcgatggacagctatctcatcgatccgaaacgtaagttgcatgtctgtggtaataacccaacctgcgacggttacgagatcgaagagggcgaattccgcattaaaggttatgacggcccgatcgttgagtgtgaaaaatgtggctctgaaatgcacctgaaaatggggcgtttcggtaaatacatggcctgcaccaacgaagagtgtaaaaacacacgtaagattttacgtaacggcgaagtggcaccaccgaaagaagatccggtgccattacctgagctgccgtgcgaaaaaagtgatgcttatttcgtgctgcgtgacggtgctgccggtgtgttcctggctgccaacactttcccgaaaagccgtgaaacgcgtgcgccactggtggaagagctttatcgcttccgcgaccgtctgccggaaaaactgcgttatctggccgatgcgccacagcaggatccggaaggtaataagaccatggttcgctttagccgtaaaaccaaacagcaatatgtctctagcgaaaaagacggaaaggcgactggctggagtgcattttatgttgatggcaaatgggttgaaggaaaaaaataacctttaattctgtcaggtttttataaacaaagggtcgcgaaagcggcccttttttattgcatattattttttcttcacacctatacactaaggctataaatgatatagtggttatagttagcaccttttttattattaaatcgtattagtcacccgccaggtgtgacgaaaaaacgatgttctgatggcgtctaagtggatggtttaacatgaaattacaacaacttcgctatattgttgaggtggtcaatcataacctgaatgtcagtagtacagcggaaggactttacacaagtcaacccgggatcagtaaacaagtcagaatgctggaagacgagctaggcattcaaattttttcccgaagcggcaagcacctgacgcaggtaacgccagcagggcaagaaataattcgtatcgctcgcgaagtcctgagcaaagtcgatgccataaaaagcgttgccggagagcacacctggccggataaaggtagtctgtatatcgccaccacgcatacccaggcacgctacgcattaccaaacgtcatcaaaggctttattgagcgttatcctcgcgtttctttgcatatgcaccagggcagcccgacacaaattgctgatgccgtctctaaaggcaatgctgatttcgctatcgccacagaagcgctgcatctgtatgaagatttagtgatgttaccgtgctaccactggaatcgggctattgtagtcactccggatcacccgctggcaggcaaaaaagccattaccattgaagaactggcgcaatatccgttggtgacatataccttcggctttaccggacgtagtgaactggatactgcctttaatcgcgcagggttaacgccgcgtatcgttttcacggcaacggatgctgacgtcattaaaacttacgtccggttagggctgggggtaggggtcattgccagcatggcggtggatccggtcgccgatcccgaccttgtgcgtgttgatgctcacgatatcttcagccacagtacaaccaaaattggttttcgccgtagtactttcttgcgcagttatatgtatgatttcattcagcgttttgcaccgcatttaacgcgtgatgtcgttgatgcggctgtcgcattgcgctctaatgaagaaattgaggtcatgtttaaagatataaaactgccggaaaaataatttcttgcgttattttcggcaccttttatgtagcgaaggtgccggaatatattctcttttgttacttatttctataccgtgcacaatatttttatccctcatatttatagggtaaattacctgtaaagtagtgtctaattacccgcctcgcaaactccagttttcaaatatctatttcaggtcaaaagattgaattattcactggagacgattcgtaaattcgctggatttttgactaaagtttctttaggatttgtctcatcgtatgattaattacaccaatcgttcaacgtcttgctgataagtgatggcgattatatgaggttagcaatgccttctggaaatcaggaaccccgccgcgatcctgaattaaaacgtaaagcctggctggcggtttttcttggttctgcacttttctgggtggttgtcgcactgctgatttggaaagtgtggggataactatggtcggtcaggagcaactggagtcgtcaccattatgccagcatagtgacaatgaaacagaaacgaaacgggaatgttccgtcgttattccagacgactggcaactaacatcgcagcagcaagcctttatagaactgtttgctgaagatgatcagccgaaacaataattatcatcattcttattacccatttttaatgaattaaagggcttttaatacaccgcagcaataacagcttgagttatctcaacacaaaataataaccgttaagggtgtagcctatgatcaacacaaatatgaaatattggtcctggatgggcgcgttttctctgtcgatgctcttctgggccgaactcctctggatcattactcactgatccttgaccccgctgcggcggggttgtcatttgctttgccacaaggtttctcctcttttatcaatttgggttgttatcaaatcgttacgcgatgtttgtgttatctttaatattcaccctgaagagaatcagggcttcgcaaccctgtcattaaggaggagctatgagcagtaccctacgagaagccagtaaggacacgttgcaggccaaagataaaacttaccactactacagcctgccgcttgctgctaaaagtctgggcgatatcacccgtctacccaagagtctcaaagttttgctcgaaaacctgctgcgctggcaggatggtaacagcgttaccgaagaggatatccacgcgctggcaggatggctgaaaaatgcccatgctgaccgtgaaattgcctaccgcccggcaagggtgctgatgcaggactttaccggcgtacctgccgttgttgatctggcggcaatgcgcgaagcggttaaacgcctcggcggcgatactgcaaaggttaacccgctcagtccggtcgacctggtcattgaccacagcgtgaccgtcgatcgttttggtgatgatgaggcatttgaagaaaacgtacgcctggaaatggagcgcaaccacgaacgttatgtgttcctgaaatggggaaagcaagcgttcagtcggtttagcgtcgtgccgccaggcacaggcatttgccatcaggttaacctcgaatatctcggcaaagcagtgtggagtgaattgcaggacggtgaatggattgcttatccggatacactcgttggtactgacagccacaccaccatgatcaacggccttggcgtgctggggtggggcgttggtgggatcgaagcagaagccgcaatgttaggccagccggtttccatgcttatcccggatgtagtgggcttcaaacttaccggaaaattacgtgaaggtattaccgccacagacctggttctcactgttacccaaatgctgcgcaaacatggcgtggtggggaaattcgtcgaattttatggtgatggtctggatagtctaccgttggcggatcgcgccaccattgccaatatgagcccagaatatggtgccacctgtggcttcttcccaatcgatgctgtaaccctcgattacatgcgtttaagcgggcgcagcgaagatcaggtcgagttggtcgaaaaatatgccaaagcgcagggcatgtggcgtaacccgggcgatgaaccaatttttaccagtacgttagaactggatatgaatgacgttgaagcgagcctggcagggcctaaacgcccacaggatcgcgttgcactgcccgatgtaccaaaagcatttgccgccagtaacgaactggaagtgaatgccacgcataaagatcgccagccggtcgattatgttatgaacggacatcagtatcagttacctgatggcgctgtggtcattgctgcgataaccagctgcaccaacacctctaacccaagtgtgctgatggccgcaggcttgctggcgaaaaaagccgtaactctgggcctcaagcggcaaccatgggtcaaagcgagcctggcaccgggtagcaaagtcgtttctgattatctggcaaaagcgaaactgacaccgtatctcgacgaactggggtttaaccttgtgggatacggttgtaccacctgtattggtaactctgggccgctgcccgatcctatcgaaacggcaatcaaaaaaagcgatttaaccgtcggtgcggtgctgtccggcaaccgtaactttgaaggccgtatccatccgctggttaaaactaactggctggccagcccgccgctggtggttgcctatgcgctggcgggaaatatgaatatcaacctggcttctgagcctatcggccatgatcgcaaaggcgatccggtttatctgaaagatatctggccaagcgcacaagaaattgcccgtgcggtagaacaagtctccacagaaatgttccgcaaagagtacgcagaagtttttgaaggcacagcagagtggaagggaattaacgtcacacgatccgatacctacggttggcaggaggacagtacctatattcgcttaagccctttctttgatgaaatgcaggcaacaccagcaccagtggaagatattcacggtgcgcggatcctcgcaatgctgggggatagtgtcaccactgaccatatctctccggcgggcagtattaagcccgacagcccagcgggtcgatatctacaaggtcggggtgttgagcgaaaagactttaactcctacggtagccggcgtggtaaccatgaagtgatgatgcgcggcaccttcgccaatattcgcatccgtaatgaaatggtgcctggcgttgaaggggggatgacgcggcatttacctgacagcgacgtagtctctatttatgatgctgcgatgcgctataagcaggagcaaacgccgctggcggtgattgccgggaaagagtatggaagtggctccagtcgtgactgggcggcaaaaggtccgcgtctgcttggtattcgtgtggtgattgccgaaagctttgaacgaattcaccgtagcaatttaattggcatgggcatcctgccgctggaatttccgcaaggcgtaacgcgtaaaacgttagggctaaccggggaagagaagattgatattggcgatctgcaaaacctacaacccggcgcgacggttccggtgacgcttacgcgcgcggatggtagccaggaagtcgtaccctgccgttgtcgtatcgacaccgcgacggagttgacctactaccagaacgacggcattttgcattatgtcattcgtaatatgttgaagtaacaactatttgcttgccggttattttgcttccggcaagcaaatgaattacacaatgcaagagggttatttgttcagcaaatggcccattttctcggctttggtatcgagataatgttcgttattggggttacgacctacaatcaatggtacgcgttcaacaatattaatccctgcttcggtcagaatttcgacttttttcgggttattggttaacaagcggacttcattgacgccaaggagtttgaacatatcagcgcaaagagtgaagtcgcgctcatcagcggcgaagcctaactggtggttagcctctacggtatcgtaaccttgatcctgcagtgcgtaagcgcggattttattcagcagaccaatgttacgaccttcctgacggtgatacagcaaaataccacggccttcctcggcaatttgcgtcaatgccgcttcgagctggaagccacaatcgcagcgcaagctgaacagggcgtcaccggtcagacattcggaatggacgcgcgcaagtaccggggtatgcccggaaatatcgccatagactagcgcgacatgatcgtgtccggttgccagttcttcaaatcccaccatcaggaaatcgccccatggggttggcagtttggcttctgccacacgtttaagctgcatgaaattctccagataatgctggttctgtattggcttattttgccataacgagaaggggttcacctaatcacgacgcgtcgatcgttcacggaatggcacaaatctgtcaatttttcctggaactggcgttttcagttatgattgtgggacttatcaaaaaggagaggccatgcgtagcattgccagacgtaccgcagtgggagctgcactattgcttgtcatgccagtagccgtatggatttctggctggcgttggcaacctggagaacaaagttggctactaaaagcggctttttgggttactgaaactgtcacccagccctggggcgtcattacacatttgattttattcggctggtttctctggtgtctgcgttttcgcattaaggctgcctttgtattatttgccattctggcggccgcaatccttgtgggacaaggcgttaaatcctggatcaaagacaaagtccaggaaccacgaccttttgttatctggctggaaaaaacacatcatattccggttgatgagttctacactttaaagcgagcagaacgcggaaatctagtgaaagaacagttggctgaagagaaaaatatcccacaatatttgcgtagtcactggcagaaagagacggggtttgcctttccttccggtcacacgatgtttgctgccagttgggcactgctggccgttggtttgctgtggccgcgtcggcgaacgttaaccattgctatcttgctggtctgggcaacgggagtcatgggaagccgcctgctgctcgggatgcattggccacgcgatctggtagtagctacgttgattagctgggcgctggtggcggtggcaacgtggcttgcgcaacgaatttgtgggccattaacaccacctgcggaagaaaatcgcgaaatagcgcaacgagaacaagaaagttaacgctggttgattttccgaatttagcccttaaatcatcaacaatgcgtgtggatgccatttcgcagacggcgcgaaaatggtactttaaagggctattgcggtaagttgaccataatttattcgctctaaccacataacgggaagtaatgtgaaatatttactcattttcttactggtgttagcgatcttcgtgattagcgtcacgttgggtgcgcagaacgatcaacaggtgacgtttaattatctgttagcgcaaggggagtaccgtatttccacattgctggcggtattgtttgctgcggggtttgctatcggttggttgatttgtggcctgttctggctgcgagttcgtgtttccctggcgcgcgctgaacgtaaaataaagcgactggaaaaccagcttagtcccgcgactgacgtggctgtagtgccgcacagcagtgcggcgaaggaataactttctatgctggagttgttgtttctgcttttgcctgtagccgctgcctatggctggtatatgggccgcagaagtgcgcaacaaaacaagcaagatgaagccaaccgcttgagccgtgattacgtagcgggggttaacttcctgcttagtaatcaacaggataaagcggtagacctgtttctcgatatgcttaaagaggatacaggcaccgttgaagcccaccttacgctcggaaacctgttccgtagccgtggcgaagttgatcgcgctattcgcatccatcagaccctaatggaaagcgccagcctgacctatgaacagcgtctgttggcgattcaacaactggggcgtgattacatggccgccgggttatatgaccgcgcggaagacatgttcaatcagctgaccgatgaaactgacttccgcattggcgcgctgcaacagttgctacaaatctaccaggctaccagtgagtggcagaaagcaattgatgttgccgaacgcctggtgaagctgggtaaagataaacagcgcgtcgaaattgcccatttctactgtgagttagccctgcagcatatggccagcgacgatctcgatcgtgccatgaccttgctaaaaaaaggggcggcggcagataaaaacagcgcccgcgtatccataatgatgggacgcgtgtttatggcgaaaggagaatacgccaaagccgtcgaaagtctgcaacgcgtgatatcccaggacagagaactggtcagcgaaacgctggaaatgttgcaaacctgctatcagcagttgggtaaaactgccgaatgggcagaattcctgcagcgtgcggtggaagagaacaccggtgccgatgctgaattgatgcttgctgatatcatcgaagcgcgcgacggtagtgaggccgcacaggtctatattacgcgccagcttcagcgtcatccgaccatgcgtgtgttccataagttaatggattaccacttaaatgaagcggaagaagggcgtgccaaagagagcctgatggtgctgcgtgacatggttggcgagaaggtacgtagtaagcctcgttatcgttgccagaaatgtggttttaccgcatacaccctctactggcattgtccgtcttgtcgggcctggagtaccattaaaccgattcgcggtcttgatggcctgtaatttttaaaaaaaatccgactttagttacaacatactaattattaatgttccattgtgctccggcaacgacggcgcagaaaaagcctgccaggggagaaatcgcaactgttaattttttatttccacgggtagaatgctcgccgtttacctgtttcgcgccacttccggtgcccatcatcaagaaggtctggtcatgacgttaactgctagttcttcttcccgcgctgttacgaattctcctgtggttgttgcccttgattatcataatcgtgatgacgcgctggcctttgtcgacaagatcgacccacgcgattgtcgtctgaaggtcggcaaagagatgtttacattgtttgggccacagtttgtgcgcgaacttcaacagcgtggttttgatatctttcttgacctgaaattccacgatatccccaacactgcagcgcacgctgtcgctgctgcagctgacttaggcgtgtggatggtgaatgttcatgcctctggtggggcgcgtatgatgaccgcagcgcgtgaggcactggttccgtttggcaaagatgcaccgcttttgattgctgtgacagtgttgaccagcatggaagccagcgacctggtcgatcttggcatgacactgagtcctgcagattatgcagaacgtctggcggcactgacgcaaaaatgtggccttgatggtgtggtgtgttctgctcaggaagctgtgcgctttaaacaggtattcggtcaggagttcaaactggttacgccgggcattcgtccgcaggggagtgaagctggtgaccagcgccgcattatgacgccagaacaggcgttgagcgctggtgttgattatatggtgattggtcgcccggtaacgcaaagcgtagatccagcgcagacgctgaaagcgatcaacgcctctttacagcggagtgcatgatgagtgattccaacagccgtctggtctacagtacggaaaccggacgtattgatgagcccaaagcggcccctgtacgccctaaaggcgacggtgtggtgcgtattcagcgtcagaccagtggacgtaaaggtaagggcgtttgcctgattaccggtgtcgatctcgatgatgccgaactgacaaaacttgcagcggaactgaagaaaaaatgcggctgcggcggagcagttaaagatggagttattgaaatccagggcgataagcgtgatttattaaaaagtctacttgaagcgaaagggatgaaggtaaaactcgcaggcggttaacataaaaagccacggatatatccgtggctttcgaatattttactgtgcgtattattcagttatttcgtactgaacagaatcaagcgtattataattgcgagtcgataatcgacatttatttacgattatttaccgacctggtgaccaataacacctccgacagctgcaccacctaatgtacccaacgtactgccatcggtcagtactgcaccgcctaatgcccctgcacccgcgccgattgcggtgttgcggtcccgtttagaccagttagaacaggcactcagagacattgccaaagtaattgccagaacagccgcggtcatttttttgctcgttacaaacataatactctctcctgaatttatgattcacggaagtaagctctctataactataatagctaagaataagtctggtgaaattattccgtgaaatctgctcgcgcgcagggttatatcacgcaggtgataatgacttcctgttatatcgctgataataattttatatcttgagagtgttaataacaggtaaatagtcttaattatcaaccaggaatcatcttagagcggatgatttgccaaactgcaaatcatccgtagagaagggaaatggttaaatgtcaacgacgtgaatggtgagtttactgtgctcaagatgcatcagatcgctggcgcgtattttgctatcggtaatcacgcgattgaatcgctcaacgggaccgatggagtaactatgtacagcaccaaatttgctgctgtcagtcaggactatcgcttcgcactctttttccagcacggcattgaccacatcggtacgcatcatatcgcgaccggtaaatccagtttcaggttgccagccatcaataccaataaatgctttgctgaaatgcacctgttggatgcactggcgtgtcaaagggccaaccatactttcgctttttttctgatacacgccaccgagcaaaataacttcacaaggcgcgtctttcagcaaatgcgcgatgtagctgctgaccgtgatgatagtgacatttttcttctgctcgcccagagtccgggcgagtagggcattgctgctgccattttcgataaagatggtttcgcccggttgaaccaggctcgcggcaaactcggcgagttcacgcttcagcgtatagttgctcatcatacgggtttcgacgtcatcactatcaaggctaacagcaaagccatgtgcacggcggaggtaactcagtttttcgagtgtgttgagatcctggcgaatggtaacttcagaaactccagtggcttttgccagatcggttacgctaacctgaccctggtcaatgaccatctgtagaatagtttgttgtcgggaattcatcgctgtaattcttataacgttataatacttaataaaaaaatactgacgcgccgggcatcctcaaataggaaaacctgaaggcacgattgttaaatctcccacggtgccttcgggatgtctggcgtagattcagcaacctggcgcaagagttctgctttaagtatctcgagattatggatcgcagagtggtaatcgcctgccacaaggatatctaacacaatatcaatacgttcggcaacgcgctgggcatcaaattcagacatcaaggacatccttatagcaaaagggggaaaatgaataatgcaaaaattgccgctaaaagagaagtgtttaacagcaacggctaattatcatccaggaatacgatatataatgacgggatatagcgctaagtatatatattcatctacttatgcgcgcttcagatagcgtttataccagcgttcgaaggcgacggcgggcatcggtttggcaaacaaaaatccttgccgctcattgatcccgttcttggttaaaaaagcatcttcctttgcactctctacaccttcggcgatcacctgaagattcaatgcctgggccacagcgacgatcgcccggaccagactctggctgacaggttgtttgtgaatatctcgaacaaaaacctggtcaagtttgatggcatcgatcggaaagcgcgccagttggctaagactagagtagccggtaccaaaatcatccagatgcacttgcgcacctagttggctaaattgttgaataacagacagtgccagttcatcattctcaatcagacaactctctgtcagttcaacatctatagggcagtattcaaaattgagttcctggagaacctgtttcagggcggtgaaaatggtttgatcggcgagctgacgtgcagaaatatttaccgccactcgcaggtttatgcctttatcccgccactttgccacctggcgtacgacatcgagaatcacccaacggcctaaaggcacaattagcccactctcttcggcgtaggaaatgaagtccaacggtggaatcaacccacgttcaggactctgccaacgtactagtgcttccagactgcgcacttcgccacgccaggtgattttcggttgatagtgaataaccaactgatcgttttccagtgctttacgcaagttggtatccagccagagatattcaaatacccgttgattcatttctggggtaaaaacgcaaaattgtcctcgtccgccttccttcgctgtgtacattgctgtgtcggcgtgacgaataatagccgtgctgtcactaccatgttcgggagagagtgcaatacctacactacagctggtataaacttcaattaaaccaatgcgaaaggggagccgtaagcgggtcaaaattcgacttgccattgcttccagcgcgctttgactggtgttggatgccagtaccagaaactcatccccacctggacgcgccaacacctggtcatgttcgagacagcttaaaatagccaaactcacgtcgcgtaataactggtcaccaaacaaatgcccataggcgtcgttgacctttttgaaattatccaaatcaagatacacaaccccaactttattgttatctgcatgattaatagcgtgatcgattaaatcctgcattgcgttacgattcggcagtccggtgatactgtcggtatttgccagaatacgcagtcgctcctgagcgcggcgctcttcggtaatgtcggtgccggaacagattaaaaaaatctcgtttttgccactgccgctgtggacaaatttattgcgaaacagaaacagccgctggcctttacatgttggtatccacagttcgacttcatatgcattgccgcttcgaaaaaatacacggttattgcgcctggatgccgcagcttcacgacggctcataaacagtttaaacacgctttgcccaatgacgtcgtgttctttcaaccctgtgtaatcttcacataaccgattgaagcgttggatattcccccggctgtcgagaatcactattgcggaatgtgcttcagaaactacctgctcagcaaaggaaagcccgtgacttaaatcacgagcaaccgccggtgtgtcatgccatgcagacgcgttgccagcccattcccgtttattgatttttcgtcctaccagatgcacagaaagatcgctttcatcgacggtcagactcatcatcaggctggaggtgatgaccgtcatttccctgatgcgagcagcctgttcggcagataactgcaatgtacgatcaggttctgtggtttcggtggtagaaaagcgcaaaacatcgctgctttccgtcaaccgccagtatggattgtggcttccgagaaagttgtacaacgttgtggactccctaacggttttcatgatgcatatcctccggttaacagcggagtccgcggttaaataaaaggaacaacatgacttacatgaaattaacggcggctaaacgcattgttttttttatatatttatttgtaatccagttttggaaaaacgccagttttcaaacgaaagtcagttaaaaaatctgcctggatataacgaaggtagagcggggaaataaacggcccatccatgaggaatgggccgtgaaaggagattacgcgaccgggcgcgcaataatgctgcgggtttccatgcggacttcggcaatagtgacgtcaataacgtcagtcactttgtaaaccgtttcacctttaatttgtacagtgccgttttcctggctgcaaaccagttcatcgcgcacagcgtgtaagaaaggtgccggaataaaggcgatagcgccgttatcaaccaaacgaacacgcatgccgccacggctgatatcgacaatttccgctgcgaaacgggtgtcggtcccggctttgtctttcaggaagcgtgcgtataaccagtcaccaacatcacgttctgccatccggttgagacggcgacgctcggccatttggacagtgatttcatcctgtgggcgcgtcgcagtttcgcctttgataaccgctttcagcagacggtggttgatcatgtcgccatatttacggatcgggctagtccaggtggcgtatgcttccagaccgaggccaaagtgaggaccgggttcagtgctaatttcagcaaaactctggaagcgacgaatgcggctgtcgaggaaaccagttggttgcgcgtccagttcacgacgcagtttgcagaaaccgtccagcgtgagcacttcttcggcatcgacatgcagaccgtgcgttttcagcaacgctgccagcgcgtcggcattcgccggatcaaagcccatatgcacgttatagatgccaaaaccgagcttatcgcgcagtacgcgggccgcacaaatgttagcggcaatcatcgcttcttcgacgatacggttggcaatgcgacgaggctcggcgacgatatccagcacttcacctttttcaccgagaataaagcggtaatccgggcgatctttaaacaccagtgcgtggttatgacgccactcgccgcggcgttggcaaatttgcgctagcaaacggacttgttcggcaattgcttcactttcaggctgccagtcaccggtattttccagccagtcagaaacctggtcatacaccagctttgctttggattcgatggtggcggcaaagaattcgatattatcttcaatggtgccatcagcggagagcgtcatgcggcatgccagtaccgggcggacttcattggcgcgcagactgcagagatcgtcagaaagctcgcgaggcagcatagggatgttgaagccaggcagatagttggtgaatgcgcgaattttcgcggctttgtccagcttgctgccttcagcaatccacgcggttggatcggcaatcgccacaatcagctgaagtttgtcatccggcaacgccttagcgaaaagggcgtcatccatatcttctgtgctggcactgtcgatggtgacaaaatccagcgcggtcagatcttcacgaaccagaccttcatcgagcatttcggtagcgacgccgtctggtgcttctttttccagattatggcgtgcaagggtaacccaccacggtacaaagtgatcgtcaccaaaagtgatgtattgtgtcagttctgcatagaaagaacgatcgcctttcagcggatgacggcgcatttcggcaaccgcccagtcgccttctttaaactcgtggttcaggccacgggctgcgcggcaaggaatggcgtcttttaagagtggatgatcaggaacgatggccagacggtcatttttgccctgaaccttacccacgaaacgagtcaggaacggttcaaccagttcttctggctctgcggattcacgttctttttcactgtggatcaccgcgataattcggtcgccatgcatgacttttttcatctgcggcggcggaatgaaataacttttttgcgcgtcgacttccaggaagccaaagcctttttctgtggcttttaccaccccttcagcgcgtggcgtctgggaatgcagttgctgtttaagctgcgctagcagcgggttgtcctgaaacataattgtctattttggtggccattagagcggctgacagttttacgcgaatctgtctgacgcggcaaggttaatatgtctcacccaacgcgatttttaagcgatttatccagccacacagcccgctccataccagcagattaataatctgcgtactacttttttcgtgttcgagtaaagggctgaactgggcggcgctaaagcgatcgggtgctcgggtcagccattgtatcgcctgaacggtagcgcgctcaacagaatgacggtcagcccattggttaatttcattttcgcccttgcgcataagggtgctgatttttttatattcattactactatccatacaggtggcaaaacaagcaggactgccatttatacgcgcgcataacaacgccgcaagctgattatccggctgtgtattgccccgtgtgctgtttaacaacttttcgagaagggaaagactaatagggtggagagagagtatttcggccagttggcaaagttctgcagtactactttttgtgtgctcttcaggtagtttttccacctcatagctgcttcgccagcgtaaactttcatcagcaaacagactcgcgtcggcgtagttttgtatctccagcccgggtaaccagcgtaccggatgcccgagataagcctgaaatgtcgcaattgtccgcgcctgaaagccaataaaaccaatgatttggctaatgatcacacagtcccaggcagtaagaccgacgtcattcagatgctggcggcttcggttgtcgataatagaagggctgctagccagttggcgggcatattgcgtgatttgtgccaaccgatgattactttccctggtggaatcaggcccggggagcggcgtaagtcgcgcgctatagtagttacataaccgctggacgccgcaaacctgagcaaccgtcagggccgtgctcaagcgttcataagcggtgaaggtctgactacgggtcacggtaagctggtcagggaacaaatccactgcaagaacacgcgcagggtccagccaactaaggaagggggccagcgtttctttttcaaggatcacgtcgagtagaaagggatcgctgacctttgcggcttccgggaccagaggcagaacgtcatactccgtagtactggattgcgtttcatgataccagtggcttttgccggtgatgtggcgttgttccatgggcgctccttggtcgtaaaggaaatcgttatcctgacgcaaggcgggaaggggagaaagacggatcggcgataacaaatatcagaaaggtataacagagataacgggcggcagaacgccgcccatctttaccaacagaacgattatttcagttcgagttcgttcattgcagcaatgctgaaaccgccgtcaacgtggaccacttcaccggagataccggcagagagatcggagcacaggaatgccgcagagttacccacatcttcaatagtaacggtacggcgaatcggggtaacggcttcgcaatgagccagcattttgcggaagtctttgataccggaggccgccagagtacggatcggaccagcagagatggcgttaacacgcacaccttccggacccatcgcgttcgccatatagcgcacgttcgcttccagagacgcttttgccagacccataacgttgtagttcgggatagcgcgctcagcgccaaggtaggaaagggtcagcagggcagaacccggattcagcatggagcggcaagcttttgccattgcaacgaagctgtaggagctgatgtcgtgggcaattttgaagccttcacgggtaacggcgttaacatagtcaccatccagctgatcgccaggtgcaaaaccaatagagtgtacgaaaccgtcaaatttcggccaaactttccccagttcagcgaacatggtgtcgatgctggcatcttctgcaacatcgcactgcagaacgatgtcagaacccaattgagcggcaaattcttctacgcggcctttcagtttgtcgttctggtaggtgaatgccagttcagctccttcgcggtgcatcgcctgagcgataccgtaggcgatggatagtttgctggcaacaccggttaccagaatgcgcttaccggaaagaaaacccatagctttaatccttattgttgatgcttgttgtgcctgaaaatcaggcgattcgtcgttttagtaaacagtacgaacagataaacggttattataatcaacctggctgtgagtagctatagttgccaggtccgaccggagcaggctgcggcagggggggcgcttttcccctcaccctaaccctctccccagaggggcgaggggaccgtattgtgcaaatattgttaccccagcaacaaacaggctcatacagcccctaaccctttcatggcgatggctgggacggttcagaccttgccgaatattctccagcaccgtctccatgttttcaccacaacagctattcggctcggtctgccccctcgctctttcagggagagggactccggcggttcagttcctgcagaatattctccagcaccgtctcctcattacaatcaatctcgttattccagaaacgcagcacggtccagccctggctctcaagccagctagtgcgcctggaatcataggcaactgctaaatcatgctgcccaccatccagctcaacgactacacgcgcgctgcagcaagcaaaatcgagaatgtagctccccactggatgttgacggcgaaatttgaaatcactaaaacgtcggctgcgaagatatcgccagagctttcgttcctgcaaagtgagattgcgtcttaaatcacgcgcattacttttaattttatctatcacctcattctgacaagatttaatcttttgtcagaatgaggtgaataatctggaaggaggattcagaaaattagcgatctttacgccacgcatccgccgtcaatgcctcgccaaaatgaccggcaatcagccgtttggtgagttcatgcagcgggcttgccagcacatccgcggtgctgcctcgctcgacaacctcgccctgatgcatcaccagcacctggtcgctaatgtgcttcatcattccgatatgctgggtaacataaatatagctaatgccctgtttttcctgtaattccagcatcagattaatcaactggctacgcatgctcatatccagactagcgagggcttcatcggcaataatgacttttgggcgcaatatcagcgcgcgcgccagacccagacgctgtttttgtccgggtgccaacatatgcggatagtaactgacgtgatccggtagcagcccaaccatacgcatcgtttcaataatctgtttgcgacgctgttccggttccaggtcggtgttcaggcgcagtggaaaatccagaatttggctgatacgttgacggggattcaagctggtgctaggatcctgaaaaatcatgcgaatacgctgactgcggaaggaataatcgccaaaatgcagtggatgatcgtcaatcaataactcgccgctggtaggctctatcattcccgccagcatttttgccagcgtggatttaccgctaccattctcgccaataatcgccagtgtctggccttcacgtagcgtaaagctcaagggttttaccgcttctacggtctgacgacgaaaccagccggtccggtagcggaacgttttacttaaattacgcacttcaagcagcgtttcgatcatctcactctttctccatgttcagcgggaaatgacaggcatagagatgatttttcgcccccgtcaaacgtggcgtcacaatgcattctcgttgtgcatacgggcaacgtggccccagacgacaaccaatcggtaactgttccagcagtgggatagcgccgggcagcgtattgaggcgacttttatgcggcatcgcgctgccgaagtctggtatcgcgcggatcagcgcctgggtataaggatgatgtggcatcgtcaccaactccttactcggcgcggtttccactgtttgaccgcagtaaagcacgttaattttatccgcccattggctaagcatttgtaagtcatggctgataagcaaaatagtggtattgctgttttggttgagacgcgtcagcaggcgaaagatttgcgcctgggttgttggctccatactgttggtcggttcgtcagcaatcagcagacgcggttgattcgccagtgcaatggctatcatcactttctgacattcaccttcggtcaactcatagggaaaactgcgcatcgcatctttgtgatctttaatccccacgcggtgcagcagttcaatggcacggcgtttgcgccagccaaaacgctgccaccaacggcctttataggtccaggctgggatgttttgcatcaactggcggcccacacgttcactagggtcaagacagctctgcggttcctggaaaatcatgctcacgttatggccaaccagtttgcgccgttcgcgtgcggagagacgcagcaaatcgatatcatcaaaacgcatacggtcagcagtaacacgccagttatctttattcaccccacaaatcgctttcgcaatcaaactcttgccggaaccggattcaccaacaagaccgcggatttcaccttcggttaaggtcatacttacccggtcgacggctttaacccactcatcaccggttttaaattcaatggtcaggttacgaatatcgagtaatggcattattccacccccgcaataatcgcacgacgaacgccatcgccaaggaggttaaccaacaacacgctaatcataattgccgcacctggcagcatgacagtccacggggcgacataaatcagttccagcgcatcaccgagcatcgctccccattcagggctggggagttgtgcgccgagatcgagaaagcccagcgcggcgatatcgagaattgccatgctcagtgcgcgggtgatctcggtgaccagcccggcggtgatgtttggcatcacagcaaaccagagaatattcagcgtacttgcgccatccagacgggcggcgataacgtactctttttccagttcgtcatgcaccatgctgtaaatgctacgtaccatacgcggcagcaatgccagccagacagcaaacatagcgtgggacaaactcggtccggcaaacgctacaacgataattgccaacagcaggctagggatcgccagtaaggtatccagaatatggttaagcaccgcactgcggaggccgtgtgtcgccccggcgaaggtgcccagtaccaggccacagatcgtcgcggcaagcgtcaccacaaatgcgccacccacggttggcgcagctccgctcagtaaacggcttaaaacatcgcgtccgaggtcgtcagtccccaggaagaaagaaacttcgccatagcggctccaactcggcggcaataattgataaccgagaaattgctggtcgatgccgtaaggcgcaaaccagccgccaaaaatacacagtacagccagccccgcgcagccgtacaggccgaccatcgcagaggcgtcactataaaatttgcgccaggcggtacgcagcgtgcccggcgggcgcttttcgctgtatacgctatcgtaaggcataccattccttatgtttcagattatttatcgtaaggcataccattccttatgtttcagagggttagccatggcacccaaaatatcagaaatcacgttaacaataatgaccagactgccacacaccatcactccggcggaaatggctgcgtaatcctgctggcggatggcgttaattaaccagcgccctaaacccggccagctaaaaaccatttcggtgatcatcgccagcgtcagcatggtggaaaactgtaagcccaggcgaggaataaccggcggtaacgcgttatgcagaacgtggcgacgcaaaatagtaaagcggctcaaaccgcgggtcgccgccgcttttacatagttctggtcatacacttcgatagtgctgatacgcatcaggcggatcacttcagttgttggcgcaacgctcagggtgatcacgggcaatatcatatggcggattgcgctcatgatcatttcatcccgccatggactgtcgctaagccaggcatcaatcaacgcaaaaccggtaatcggtttcacttcgtagagcagatcgaaacgcccactaacgggcaaccaacctagcgtgagactacaaaacagcgtcaacagaagcgccagccagaacaccgggatactaaagcccagtaaggcgatggcgttgatcaagttatcctgccacttatggcgcgtaatcccggcaatcatccccacggggatgccaacaatcagcgcaaaaccgaaggcgaggatgcacagttccatcgtcgccgggaagacctcttttaactgttcggcaatcggttgaccgttaatgctggaaacaccaaaatcccagtggatcaggccgttaaaccagaacacccaggcattccacagactcgcgccttgtaacggcgcatgaggggtgaaatagctcaagctgaagccaacgaaggtcagcaggaacaaggtgacaatcaataacaaaatgcggcgtaaggtgaagataatcatggttttttcacctcatcctgtttctcgcgatacaccccagcaaaggaggcgttaccaaacgggctaagtaccagacctttgatatcgtaccgataggcctgcaaacgcaaactgctcgccagcggcaaaatgggcaattcctgcgccagaatactctgcgcttcgtcataggcttcaatacgcgccgccagctgctggctagagagcgccttacgcaatacgctgtcgaatttcggatcgcaccagtgggcgaggttggtctggctatgaattgccgcgcagctcagtaacggacggaagaaactgtccgggtcgttactgtccgtcgcccaaccggataacgtcagatcatggctcatatccatcaaccgcgcctcctgaaagcgaccttctaccggcacaatcaccacttttacgccaacctgcgccatatccgcctgaatcagttcggcagttttcagtggactggggttccacgcctggctacgtgtgggcacccacagtttcagcgttaaattttccagccccaagctcttcaactgttcgcggcttttcgccggattgtattcagtaattttagcctcgttgtcataggcccagctggcgcgcggtaaaatagaggccgccgtttcagccgtaccataatagatggattgcatcaggcgctggttattaatcgccagtgccagcgcatggcggacagcgggattatttagcggcggtttggcggtgttaaatgccagataggcgacgttcatcccaggacgcagcgttaaacgcaagcgcgggtcgtcacgcaaaatggatagctggctggcagcaggccaggccagaacgtcgcattccccggtcaggagtttgctcagacgtccggtgccgccggagcctaaatccaccactacctgcggcattaacggtttaccgcgccagaagtcatcatgacgttgtaggcgaataaattgcccggcgcggtattcgctcaactgatacggaccggtgccgaccggttgacggtcgagttgctcctggcgatcttctttctctaacttccgggcatattctgcgctcatgacgctagcataatgggttgcgaggtgccacaaaaaagaagcatccggctgggcgagtcggaactcaacggtatgattatccagtttgcggacgcttttcacgttatcggcaaattgcaggctgtcgaagtaggggaagttgctgccgttgacgttatgccacgggttgttgcggtcaaaaattcgctggaaggtaaacaccacatcgtcggcattcattttacgagtgggagtaaaccagtcggttttttgaaacggaacatcgcgacgcaggtggaagcgataggtcgcgccgttgtcgagtacttcccagctttcggcaagttccggcatcaggcgataggtatagggatcgacatccagcagtcgatcataaaactgggcggcaagggtatcgacaattaacccactgctcgctttggatgggttaaaggtgttgacttgcccgctgacgcaatagacaaaaccgctgtcgcggatatcagcatgcgggggagattcaggcgcggcgattgcctgaccactcacaagtccagcaatcaccaaaagagagcttaatacctggcgcataatattaagggattttatgtaaagaggctatcttactaatatttaatgacatttgccattaccgtttgtgttcaggggtcgtaatgagggccgtgtggttggtcgttgaacaggtgacgtcgccatctgttcaacattcgtacccgtgatttctctataactataactcacagaacaacttagcgaggagcagagcggtacgatcgtgagaaacccattaaagcacgctgcagtgcgtgtcattgttagccagatgcggcgtgaacgctttatccggacaacgatactgaccgatcgtctgcaattaaatcattactcattaccccattgattcaaaaactctgcgatctcatcaatgcgtacgggattaatccccgcttcagcagccatttcatgttgggcttcttcgctgatctcttcattgttcatcaaacgggtgagcagtaactggaagtagtgggccagcggtgtgcgttcagcctctgcgacaggctctgcgcattcggtcgcgtactcatcggcaatatcaaaatattttagcgggatatcgtggttcattatttgcccctggggttaatgcgctaagcataagggcggatgatagcactcgtgatccgggtcatacatctttttatagttaatggcgcggcgcgttaccctcaggcaggataatgcgccgcgcatccgactattacgtttcactcaccggcgttctgtcaccatcatacaacggcactttgcgatagcggcggatcagataccataaatatgcgccgcctaagctagcccataccagaccgagtgtcagactcgtactctcgaggttaacccacagcacacccaccgtcagcgcgccaaccagcggcatcagcaaatagtggaagtgatccttccagcttttattcattcctttacgccgccagaaatgattaaacacgctcagattcacgaaggtaaacgccaccagagcaccgaagttaattaacgctgtggcggtaactaaatcgaagaacagcgcgctcaacgcgacaatcccgaccataatgacgttgagtgccggagtccgccattttgggtgcacatagccaaacacgcgctccggaaacacattgtcacgccccatcacatacagcagacggctcacgctggcatgactagccaggccagaggctaacgtgttcacaaacgtggtgcagaggaaaatgctctggaagagcttgccgccgacgtacagcgcaatttcaggcagtgcggcatccggatctttaaagcggctgatatcgggaaagaacagctgcataaagaagctcgccgcgataaagataacgccaccgtagaccgccgtcaggaagatggctttcgggatcacgcgtgcggcgtccggcgtctcttcgctaagcgtggtcaccgcatcgaaaccgaggaaggagaaacagacaatcgtcgccccggtaataatcgggatcaggtgcgcgttctcgctgataaacggctgaagactccagacggtgccaacgccttctcctttatgcagtccctgaactaccaggaagataaacaccaccatgatggagatttgcaccagtacaaacagggtattgaagttagcgaccaggttgacgctcttcagattcgcggcggttaaaatggcgacgaaggttaccacccacacccacggcggcacttccgggaagagggcggagagatagattttcgccaacaagacgttaatcatcggcaaaaagagataatccagcaggctactccagccgaccataaatccgacgtgcgggttaatgctcttttgcgcgtaggtataggcgctaccggcctccggaaactggcgaaccagtttgccgtagctgatagcggtaaacagcacacccgccagcgccagcaaataggacgccggaacgtgaccgtcgctaatgccggagacaataccaaaagtatcaaatacggtcatcggcgtgagataggccagacccatcatcaccacctgccacaatttcagactttttcgcagacgggttttgccgggttgcgcagcaatattcagtggactattaatagccataattgctgcctcccctgcgtaataaggtttgcggtcgtgtcgacctgaaatcaaacctgtttagcaagggaagcaaagggggcggagtccagtcagtagcaggaggggcgcatacgcagcctccctcgccatgcggggatttaatcatcggcatcatctcatttcctcgtcacagtcttaatcgttaacggaagcccgttgccgcccgcgctccataacgcgacatccgggaaatgtctggattaccagcaaatgtcaggcctggctccgctcaggccgatgaaacaaccccgcaaggggtattacgcgtttttcaacatccactcaatttctgtttctgtgatgaggcgctcaaactgcaacagctcatcatttttacaggcgtgatagacatggcagaagcgttcgcctaaatagcggcgcaggtgatcattctcgataaactcacccagggcatcgctctggcgaatcggaaagggtaagccttcctgttccagcccgttgccttcgacttcttcctgcaacggcagctcgttatcaaggccatgcaaaataccggcaaaaatcgctgccatcaccagatatgggttggcatcggcacccgccacgcgatattccacgcggtgattatgacggtcgccgcacggaatacgcagggcgacggtgcggttgttatggccccagctcgcctgcgtcggcacatacattcccggctggaagcggcgatagctgttcacgtttggtgccagcaacgccatgctgctcggcatcaggtcaatcatcccggcgagcatctttttcagcagcgggctatcttcgccttccgcgtcagaaagcacgttctcgccacgattattttgcatactgatatggatatgcattccgctgcccgcgtgctcttcatacggcttcgccataaaagtggcgtgcatcttatgcttttctgccatcagacgcaccaggcgttttagtgccagcgcatcatcgcaggcttccagcacgttatcagtatggtaaaggttgatttcaaactgacccgggctggcctcagcgaccgcgccatctgccggaatcagctgtaactgcgccagttcatcaatatcattgagcacgtcggcgaagtggttgaggttatcaacggagtaaacctggctttgtgtattgcggtcatcggtgccaggcgcgcagggcggttgcagatacccttcagcgtcgcgctggcgatccagtaaatagaactccagctctaccgctacgaccgggaacaatccgcgctggcgcagctgctgccacaggcggttaagaacgttccgcggctcaacgtcaaagggagcgccatcttcatcgaccatggtcaggagcatctgaccgataaactctggatcggcggcagaaggagttaaggaaccgagaacaggaacacaggtacgatccggctcgcccatttcctgacccagacctgcttcttctactacgttgcccagaatatccattgcaaatacgctggccgggaaataacaccctttctcgagcttcttcaggctactaacaggaatacgctttccacggaagcaaccatttaaatcggtaagtaaaacatcaacatattgcgtattcgggtagcgctccaggtagcgtttcacttcctgcgtaaaggcgctaccccgcctctcttcactctgctgaacaaagttctctacttcaacgatattggtttccatgattcttcgcctttggtttgttttccgctcgttatcaaagcgtaaaatataatgaccaccattcgaatctgtatgcaaactaaatgtttgtcaaatgttaaattgagtttgcaaaaatgaaaacccactgctagattgaaaaaatattgaacataaaggtcatttaaagcgcagtaatggcgataatttagtccactttgtgagattgagcatggaaaatataatgaacaatccggttatcggtgtcgtaatgtgcaggaacaggcttaagggtcatgcgacccagactctgcaagaaaagtacctgaatgccatcatccatgcaggcggcttgcctattgcgctaccacatgcgctggcggaaccgagtttacttgaacaacttttgccgaaactcgatggcatttatcttcctggtagtcccagcaatgtgcagccgcacctatatggtgaaaacggcgatgagcctgacgccgatcccgggcgtgatcttctgagcatggcgataattaatgccgcactcgaaaggcgcatccccattttcgccatctgccggggtttacaagaactggtggtggcaaccggtggtagcttgcatcgcaagctgtgcgaacagcctgaattgctggaacatcgggaagatcccgaactgccggtggaacagcaatatgcaccgagccatgaagttcaggttgaagaggggggattactgtctgcgttgttacctgaatgtagcaacttttgggtaaactctctacatggacaaggggcgaaggtcgttagcccacggttgcgtgttgaagctcgcagcccggatggcttagttgaggcggttagcgtcatcaatcatccttttgcgctgggcgtacagtggcacccggaatggaacagtagcgagtacgcgcttagccgtatattgttcgagggctttatcaccgcttgtcagcaccatatcgctgaaaaacagcgactctgaccactacagtttaaggaaatgcaaatatgagtgatgagggactggcgccaggaaaacgcttgagcgaaatccgccagcagcaggggcttagtcaacgtcgtgccgccgaactctccgggctgactcacagtgctatcagtacgatagaacaagataaagtcagccctgccatcagtacgctgcaaaagctgctgaaggtgtatggtctgagtctcagcgaattcttttccgagccggaaaaacctgatgagccgcaggtcgtcattaatcaggacgacttaattgagatgggtagtcagggtgtgagtatgaagctggttcataacggtaacccgaatcgcacgctggcgatgatctttgaaacgtaccagccgggcacaaccactggggaaagaattaagcatcagggtgaggaaataggcactgtactggaaggtgaaattgttctgacgattaatggtcaggattaccacctcgtcgcggggcaaagttatgccattaataccggcatcccgcacagtttcagtaatacgagcgcaggtatttgccgaattatcagcgcccatacgcccaccacgttttaatctttttgttctgtaagccgggtaagcgcaatgcgcccggcaatctatacacaaaatcattcaagttgcatcaaggcggcaagtgagcgaatcccgatgagcttactcaggtaagtgattcgggggagcgaacgcagccaaggcagaggcggcttgaaggatgaagtgtatataaagaatgtcgccagaaataaacgggcatacggcccggggatctctgcgccctgacgttcacaaactgcatatatctgatagacgtgaaacaggagtcataatgaattttcatcatctggcttactggcaggataaagcgttaagtctcgccattgaaaaccgcttatttattaacggtgaatatactgctgcggcggaaaatgaaacctttgaaaccgttgatccggtcacccaggcaccgctggcgaaaattgcccgcggcaagagcgtcgatatcgaccgtgcgatgagcgcagcacgcggcgtatttgaacgcggcgactggagtctctcttctccggctaaacgtaaagcggtactgaataaactcgccgatttaatggaagcccacgccgaagagctggcactgctggaaactctcgacaccggcaaaccgattcgtcacagtctgcgtgatgatattcccggcgcggcgcgcgccattcgctggtacgccgaagcgatcgacaaagtgtatggcgaagtggcgaccaccagtagccatgagctggcgatgatcgtgcgtgaaccggtcggcgtgattgccgccatcgtgccgtggaacttcccgctgttgctgacttgctggaaactcggcccggcgctggcggcgggaaacagcgtgattctaaaaccgtctgaaaaaagtccgctcagtgcgattcgtctcgcggggctggcgaaagaagcaggcttgccggatggtgtgttgaacgtggtgacgggttttggtcatgaagccgggcaggcgctgagccgtcataacgatatcgacgccattgcctttaccggtagtacccgtaccgggaaacagctgctgaaagatgcgggcgacagcaacatgaaacgcgtctggctggaagcgggcggcaaaagcgccaacatcgttttcgctgactgcccggatttgcaacaggcggcaagcgccaccgcagcaggcattttctacaaccagggacaggtgtgcatcgccggaacgcgcctgttgctggaagagagcatcgccgatgaattcttagccctgttaaaacagcaggcgcaaaactggcagccgggccatccacttgatcccgcaaccaccatgggcaccttaatcgactgcgcccacgccgacagcgtccatagctttattcgggaaggcgaaagcaaagggcaactgttgttggatggccgtaacgccgggctggctgccgccatcggcccgaccatctttgtggatgtggacccgaatgcgtccttaagtcgcgaagagattttcggtccggtgctggtggtcacgcgtttcacaagtgaagaacaggcgctacagcttgccaacgacagccagtacggccttggcgcggcggtatggacgcgcgacctctcccgcgcgcaccgcatgagccgacgcctgaaagccggttccgtcttcgtcaataactacaacgacggcgatatgaccgtgccgtttggcggctataagcagagcggcaacggtcgcgacaaatccctgcatgcccttgaaaaattcactgaactgaaaaccatctggataagcctggaggcctgaaatgaccgaacataccagcagttactacgccgccagtgcgaataaatatgcaccattcgacacgctgaatgagagtatcacctgcgacgtttgcgtggttggcggcggctataccgggctctcctccgcgctgcatctggcggaagcgggctttgacgtagtggttctcgaagccagtcgcatcggctttggcgcaagcgggcgcaatggcggacagcttgtgaactcctacagccgcgacatcgacgtgatcgaaaaaagctacggcatggacaccgcccgtatgctcggcagcatgatgttcgaaggtggtgagatcatccgcgaacgtatcaaacgttatcagattgactgcgactaccgccccggcggcctgtttgtggcgatgaatgataaacagctcgccacacttgaagagcagaaagagaactgggaacgctacggcaataaacagctggaattgctggacgccaacgccattcgccgtgaagtagccagcgatcgctataccggtgcgctgctggatcacagcggtgggcatattcatccgctaaaccttgccattggcgaagcggacgccatccgcctcaacggcgggcgcgtgtatgaactttctgccgtgacgcagatccagcacaccacgccagccgttgtgcgaactgccaaaggtcaggtgacggcgaagtatgtgattgtcgccgggaatgcgtatctgggcgataaagtagagccggaactggcgaaacgcagcatgccgtgcggcacgcaggtgatcaccaccgaacggctgagcgaagatttagcccgtagcctgatcccgaaaaactactgtgtggaagactgtaactatctgcttgattactaccgtcttaccgccgacaaccgcctgctgtacggcggcggcgtggtctacggcgcgcgcgacccggatgacgttgagcgccttgtggtgccgaaactgctgaaaaccttcccgcagctgaagggcgtgaaaattgattaccgctggacgggcaacttcctgctgaccctgagccgtatgccgcagtttggtcgcctcgataccaacatctattacatgcagggctacagcggccacggcgtgacctgtactcatctagccggacgtttgattgccgaactgctgcgcggcgacgccgaacgtttcgatgccttcgccaatctgccgcattacccgttccccggcgggcgcacgctgcgtgtgccgtttaccgcgatgggcgcggcgtattacagcctgcgcgatcgtctgggcgtttaatttccgattaaccgtgaagagtcaaaaggtgtgaaacatgagcaacaatgaattccatcagcgtcgtctttctgccactccgcgcggggttggcgtgatgtgtaacttcttcgcccagagcgctgaaaacgccacgctgaaggatgttgagggcaacgagtacatcgatttcgccgcaggcattgcggtgctgaataccggacatcgccaccctgatctggtcgcggcggtggagcagcaactgcaacagtttacccacaccgcgtatcagattgtgccgtatgaaagctacgtcaccctggcggagaaaatcaacgcccttgccccggtgagcgggcaggccaaaaccgcgttcttcaccaccggtgcggaagcggtggaaaacgcggtgaaaattgctcgcgcccataccggacgccctggcgtgattgcgtttagcggcggctttcacggtcgtacgtatatgaccatggcgctgaccggaaaagttgcgccgtacaaaatcggcttcggcccgttccctggtagcgtgtatcacgtaccttatccgagtgatttacacggcattagtacacaggactccctcgacgccatcgaacgcttgtttaaaagtgacatcgaagcgaagcaggtggcggcgattattttcgaaccggtgcagggcgagggcggtttcaacgttgcgccaaaagagctggttgccgctattcgccgcctgtgcgacgagcacggtattgtgatgattgctgatgaagtgcaaagcggctttgcgcgtaccggtaagctgtttgccatggatcattacgccgataagccggatttaatgacgatggcgaaaagcctcgcgggcgggatgccgcttagcggcgtggtcggtaacgcgaatattatggacgcacccgcgccgggcgggcttggcggcacctacgccggtaacccgctggcggtggctgccgcgcacgcggtgctcaacattatcgacaaagaaagtctctgcgaacgcgcgaatcaactgggccagcgtctcaaaaacacgttgattgatgccaaagaaagcgttccggccattgctgcggtacgcggcctggggagcatgattgcggtagagtttaacgatccgcaaacgggcgagccgagtgcggcgattgcacagaaaatccagcaacgcgcgctggcgcaggggctgctcctgctgacctgtggcgcatacggcaacgtgattcgcttcctgtatccgctgaccatcccggatgcgcaattcgatgcggcaatgaaaattttgcaggatgcgctgagcgattaatagcccaacgcaataatgtctgatgcgctgcgcttatcaggcctgcaaacgacgtattgattatgtatgccgaataaagcattcacgccgcatccggcaagttgtattgctcaacttcgttaaatctggtgctttttcaacaacgcgcggaactgatgataagttaaccccagtaattcagccgcgcgcttctggttatatttcccttgttgcaaactgagttgcagcaactctttttcctgctgcatctgaaactcacgtaaatccagcggcagtgttggaaggctggtggtttcactaacggcgatagcgtcttcaggcggacgccgtttaaagggatcaataatgatgtcatcaagcggataatcgctggtgccgtggcgatacacactacgttccaccacgtttttcaattcacgaatatttcccggccaacgataattcagcaatgtttctctggcgcgctccgtaaaccccgggaacagaggcagcttgatttcccgacacatctggatggcaaagtattctgccatcaacattatgtcgctttcgcgctcgcgcagtggtggcagttgtacaacatcaaaagccagtcggtcgagcaggtcagcgcgaaaagtgccttcattgaccatcgccgggagatcggcattcgtcgcgcataccaaccgcacattcacctgcaatggttggctgccgccaacgcgctccagttcaccgtactcaatcacgcgcaataatttctcctgcaccatcatcggtgccgtagcgagttcatcaagaaatagcgtaccgccgtcggcacgttcaaatctccctggatgacgtttttgcgcaccggtaaacgcccccgcttcgtgaccaaacagttcggaatccagcagattttcatttaacgccgcgcagttaagggaaataaacggcccttgccaacgggaggagagataatgcaggcggctggcaatcagctctttaccggtgccgcgttcgccgatgatgagcaccggtttgtccagcggtgcgagatggctaacctgttccagcacttcgagaaagctgttcgcctcaccaagtaaattatctttgtattctgccatgatgaaattcgccacttgttagtgtaattcgctaactcatcctggcatgttgctgttgattcttcaatcagatctttataaatcaaaaagataaaaaattggcacgcaaattgtattaacagttcagcaggacaatcctgaacgcagaaatcaagaggacaacattatgggtattttttctcgctttgccgacatcgtgaatgccaacatcaacgctctgttagagaaagcggaagatccacagaaactggttcgtctgatgatccaggagatggaagatacactggttgaagtacgttctactagcgcgcgcgcgttggcagaaaagaaacagctgactcgccgtattgaacaagcgagcgcgcgtgaggttgaatggcaggaaaaagccgaactggcgctgctgaaagagagagaggatctggcacgtgcagcgttaattgaaaaacagaaactgaccgatctgattaagtccctggaacatgaagtgacgctggtggacgatacgctggcacgcatgaagaaagagattggcgagctggaaaacaaattgagcgaaacacgcgctcgccagcaggcattgatgttacgtcatcaggcggcaaacagcagccgcgatgtgcgtcgtcagctggacagtggcaaactggatgaagcaatggctcgtttcgaatctttcgaacgtcgtattgaccagatggaagcggaagcagaaagccacagcttcggtaaacaaaaaagcctggacgatcagtttgccgaactgaaagccgatgatgcaatcagcgaacaactggcacaattaaaagccaaaatgaagcaagacaatcaataataacatccaggcggcgtccgaacgcgccgccgctcatcgtctaaggagtacttatgagcgcgctatttctggctattccgttaaccatttttgtgctgtttgttttaccgatctggttatggctgcattacagcaatcgttctggtcgcagtgaattgagccaaagtgagcagcagcgattagcgcaactggctgatgaagcaaaacggatgcgcgaacgtattcaggcgctggaatctattcttgatgcagaacatccgaactggagggatcgctaatggcgggcattaatctcaataaaaaattatggcgtattccacagcagggcatggtccgcggcgtctgcgccgggattgccaactattttgatgtaccggtaaaactggtgcgtatcctggtggtgctgagcattttcttcggtctggcgctgtttaccctggttgcttacatcattttgagttttgcgcttgatccaatgccggacaacatggcctttggtgagcagctaccttccagcagcgaattgctggatgaagtcgaccgtgaactggcggcaagtgaaacgcgtttacgcgagatggaacgttatgtcacttccgatactttcacgttacgtagccgtttccgtcaactgtgaggaaagttatgaatactcgctggcaacaggccgggcaaaaggtaaagcctggtttcaaattagcaggcaagctggtacttcttaccgcactgcgctatggcccggcgggtgtggcgggctgggcgataaaaagtgttgctcgccgaccgctgaaaatgttgctggctgtggcgctggaaccgctgttaagtcgggctgctaataaactggcacagcgttataaaaggtgaggggagtttcgcaaaaattgttaaatctcaggcgtataatggatggcaattttcatccatagaaggacgcttacatgtttaaaaaaggcttacttgctctggcactggtgtttagtctgcccgttttcgccgctgaacactggatcgatgttcgtgttccagagcagtatcagcaagagcacgttcagggggccatcaatattcccctgaaggaagtgaaagagcgcattgccaccgccgttccggataaaaacgacaccgtgaaagtgtattgcaatgccggacgccagagtgggcaagcaaaagagatccttagcgagatgggatatacccacgttgagaacgccggtggcctgaaagacatcgcaatgccgaaggtcaaaggttaaaagaattcaccatgagcggcgcttatgcgccgtttttttttctgtcacaccttatttacatccccatagattatttgcgtcagctcacaaatacgctttttccctggtaaaaaatgatttcctgcgtgactaaaacccttgtgctcaattgacagtttattttctgcggagtagtctctcgtttcatgggaccgctaccacggaaaggcaacatgaaacagaaaattacggattacctggacgaaatctacggtggaacatttaccgcaactcatttacagaaacttgtaacgcgtcttgagagtgcgaaacgattaattacacagcgacgtaaaaaacactgggatgaaagtgatgtcgtgttaattacctatgccgatcaatttcacagcaatgatttaaaaccattacccacatttaatcagttttaccatcaatggctgcaaagcatttttagtcatgttcatttgttgccgttttatccatggagttctgatgatggctttagcgtaattgattatcatcaggtcgccagtgaagcgggggagtggcaggatattcagcaactcggtgaatgcagtcatttaatgtttgattttgtctgcaaccatatgagcgcaaaaagtgaatggtttaaaaactatttacaacagcatccaggttttgaagatttttttattgccgttgacccgcaaaccgatctcagcgccgtcactcgcccgcgtgcgttaccgttattaacgccattccagatgcgcgatcatagtacgcgccatttatggaccacctttagtgacgatcaaattgacctgaattaccgtagccctgaagtgttgctggcgatggtggatgttttactctgttaccttgcgaaaggtgctgagtatgtccgcctggatgccgttggctttatgtggaaagagccgggaacaagctgcatccatctggaaaaaacacatctgattatcaaactgttacggagcattattgataacgttgcgccaggtacagtgatcattaccgagaccaatgttccgcataaagacaacattgcttactttggcgcaggcgatgacgaagcacatatggtgtaccagttcagcctgccgccactggtgctgcatgcggtgcaaaaacagaacgttgaggcgctttgtgcgtgggcgcaaaacctgacactaccttccagcaacaccacctggtttaacttcctcgcctctcacgatggcatcgggctaaacccgctacggggcttgttgcctgaaagcgaaatattagagctggtcgaggcgttacagcaggaaggtgcattagtaaactggaaaaataatcccgacggtacacgcagtccgtatgaaataaatgtgacctatatggatgcgttaagccgccgtgagagtagcgatgaagaacgttgcgccaggtttatccttgcccatgcgattttgttaagtttccccggtgtgccagcgatatatattcaaagtattcttggcagccgtaatgattacgcaggtgtcgaaaaactcggatataaccgtgcgattaaccgtaaaaaatatcacagtaaagagataacccgagaactgaacgatgaagctacattaaggcatgcggtatatcatgagttgagccgtttaattacacttcgtcgcagccataacgagtttcatccggataataattttaccattgatacgattaatagttccgtaatgcgtattccaagaagtaacgctgatggtaattgtctgactggattgtttaatgtcagtaaaaatattcagcatgtaaatattactaatctgcatggtcgggatctgattagtgaagttgatatattgggtaatgaaataacgctgcgcccctggcaggttatgtggattaaataaaaaggaacatctcatgattaaaagtaaaatcgtgctgttaagtgcactggttagttgcgccctgattagtggctgtaaagaagaaaataaaacgaatgtatccatcgaatttatgcattctagcgtggagcaggagcgccaggccgttatcagtaaattgattgcccgttttgaaaaagaaaaccctggcatcaccgttaagcaagtgcccgtggaagaagatgcctataacactaaagtcattactcttagtcgtagcggtagcctgccggaagtgatcgaaaccagccatgactacgccaaagtgatggacaaagagcagcttatcgatcgcaaagcggttgccacagtcatcagcaacgttggtgaaggcgcgttttacgatggcgtactgcgtattgtgcgtaccgaagatggtagcgcatggaccggtgttcctgtcagcgcctggattggcggtatctggtatcgcaaagatgtgctggcaaaagcggggcttgaggagccgaaaaactggcaacagctgctggacgttgcacagaaactgaatgacccggcgaataaaaaatacggcattgcgctgcctacagcagaaagcgtgttgacggaacaatccttctcccagtttgcgttatccaaccaggctaacgtctttaacgccgaaggcaaaatcacccttgatacaccagagatgatgcaggcactgacctattaccgcgaccttactgccaacactatgccgggttctaacgacatcatggaagtgaaagacgcctttatgaacggcaccgcgccgatggcgatttactccacctatatccttccggctgtgattaaagaaggcgacccgaaaaacgtcggtttcgtggtgccaaccgagaaaaactctgcggtctacggcatgttgaccagcctgaccattaccgccgggcaaaagaccgaagagacggaagcagcagaaaaatttgtcacctttatggagcaggcagacaacattgccgactgggtgatgatgagcccaggtgctgcgctgccggtgaataaagcggtggtgactaccgccacctggaaagacaacgacgttattaaggcgctgggtgaactaccgaatcagctaatcggtgaactgccaaatattcaggtttttggcgcagtaggggataaaaactttacccgcatgggtgatgtgacgggttctggcgtggtgagtagtatggtgcataacgtcaccgtgggtaaagccgatctctctactacgctgcaagcgagccagaaaaaactggatgaactgatcgaacagcactaaacccaggacaggaatccgcaatgaacaggctttttagtggtcgttccgatatgccctttgcgctgctgcttctcgcgcccagcttattactgctgggcggtctggtggcgtggccgatggtgagcaatatcgaaatcagttttttacgtctgccgctcaatcccaacatcgagagtacgtttgttggggtgagcaactatgtgcgtatcctctccgatcccggcttctggcatagcctgtggatgacggtctggtataccgcgctggtggtggcgggcagcaccgtgctcgggctggcggtggcgatgtttttcaaccgcgagttccgcctgcgcaaaaccgcgcgtagcctggtgatcctctcctacgtaacgccgtccattagcctggtgttcgcctggaaatacatgttcaacaacggctacggcattgttaactacctcggcgtcgatcttctgcatctctatgagcaggcaccgctgtggttcgataatccgggcagtagctttgtgctggtggtgctgttcgccatctggcgctacttcccgtatgcctttatcagctttctggcgattttgcagaccatcgacaaaagcctgtacgaagcggcagagatggatggcgctaatgcctggcaacggtttcgtatcgtcacgctgcccgcaattatgccggtcctggcgacggtggtgacactgcgcaccatctggatgttctacatgttcgcggatgtttatttgctgacgaccaaggtcgatattctcggtgtatatctctacaaaaccgcctttgcctttaatgatttaggaaaagcggcggcgatcagcgtggtgctcttcatcattattttcgctgtcattctgctgaccaggaaacgggtgaacctcaatggcaacaaataaacgcacactcagtcgcatcggtttttactgcgggctggcgctgtttctcatcatcacgctgtttccattttttgtgatgctgatgaccagcttcaagggcgcgaaagaggcgatcagtctgcatcctacgctgctgccgcagcagtggacgctggagcattacgtcgacatttttaacccgatgattttcccgtttgtcgactacttccgtaacagtctggtggtgtctgtggttagttccgtggtggcggtattcctcggcattcttggggcttacgcgctttcccgcctgcgctttaaaggtcggatgaccatcaacgccagcttttacacggtgtatatgttctctggcattttgctggtggtgccgcttttcaaaatcatcaccgcgcttggcatttacgacactgagatggcgctgatcatcaccatggtgacgcaaactctgcccaccgccgtgtttatgctgaaaagctacttcgacaccatccccgatgagatcgaagaagcggcgatgatggatggcctcaaccgtctgcaaattatcttccgcatcaccgtgccgttggcgatgtccgggctgatatccgtgttcgtctactgctttatggtggcgtggaacgactatctgtttgcgagcattttcctctccagcgccagcaatttcaccttaccggtgggcctgaacgcgctgttcagtacgccagattacatctggggacggatgatggcggccagtctggtgaccgcattgccggtggtgattatgtatgcgcttagcgaacgttttattaagagtggtttgaccgccggtggcgtgaagggctaaagcggccagtttctttacaaggagttttaaatgaaaaagttagtagccacagcaccgcgtgttgctgcgctggttgagtatgaagatcgggcgattttagctaatgaagtgaagatccgcgtgcgtttcggcgcaccgaaacacggaacggaagtggtcgacttccgcgccgccagcccgtttattgatgaagactttaacggcgaatggcagatgttcactccgcgtccggcagatgcgccgcgcggcattgagtttggcaaattccagcttggcaacatggtggttggcgacattatcgagtgcggcagcgacgttaccgactacgcggtgggcgacagcgtatgcggctacggcccgctctccgagacggtcatcattaacgcagtgaataactacaagctgcgcaaaatgccgcaaggcagctcctggaaaaacgccgtctgctacgacccggcgcagtttgccatgagcggcgtgcgcgatgccaacgtgcgcgtaggggattttgtggtggtggtagggcttggcgcaatcggtcaaattgccatccaactggctaaacgcgctggcgcttctgtggtgattggcgtcgatcctatcgcccatcgctgtgatattgcccgtcgccacggcgcggatttctgccttaaccccatcggcactgatgtaggtaaagagatcaaaacgctgaccggcaagcagggtgccgatgtgattatcgaaaccagcggctacgccgacgcgctgcaaagcgcgctccgcggtctggcttatggcggcaccatctcctatgtcgcgtttgccaagccgtttgccgaaggttttaacctcggacgcgaagcgcatttcaataacgccaaaattgtcttctctcgcgcgtgcagcgaaccgaacccggattatccgcgctggagccgcaagcgtattgaagaaacctgttgggaactgctgatgaacggttatctcaattgcgaagatttaatcgacccggtggtgacctttgccaatagcccggaaagctatatgcagtatgtcgaccagcatccggaacagagcatcaaaatgggcgttacgttttaattcaaaggaatgaaaaaaatgaaaatcggcacacagaatcaggcgttctttccggaaaacattctggagaaatttcgttatatcaaagagatgggcttcgatggttttgagattgacggcaaactgctggttaacaacatcgaagaagtcaaagcggcgatcaaagaaaccggtttaccggtgaccaccgcctgcggtggctatgacggatggattggcgactttatcgaagagcgtcgtcttaatggcttaaagcagatcgagcgcattctcgaagcgctggcagaagtgggcggtaaaggcatcgtcgttccggctgcgtggggcatgtttaccttccgcttaccgccgatgaccagcccgcgtagcctggacggcgaccgcaaaatggtgagtgattccctgcgcgtactggaacaggtcgccgcgcgtaccggaaccgtggtgtatctcgaaccgttaaaccgctatcaggatcatatgatcaacaccctcgccgatgcccgccgttacatcgtcgaaaacgatcttaaacatgtacagattatcggcgatttctatcacatgaatatcgaagaagataacctggcgcaggcgctgcatgacaaccgcgacctgctcggtcatgtgcatattgcggataaccatcgctaccagccgggcagcggcaccctggatttccacgcgctgtttgaacagctgcgcgcggataactatcagggctatgtagtgtacgaagggcgtatccgggcggaagatcctgcccaggcgtaccgtgatagcttggcctggttgcgtacctgctaagaggtctttgtgaaaagtgcaatgacaagctctccgctgcgggtcgcgataataggcgcaggccaggtggcggataaggttcatgctagctactactgcacccgcaacgatctggaactggtggctgtctgtgacagccgcctttcccaggcgcaggcgctggcagaaaaatacgggaatgcatccgtgtgggacgatccgcaggccatgctgctggcggtgaaacctgatgtggttagcgtctgcagtcctaaccgttttcattacgaacataccctgatggcactggaagcgggctgccatgtgatgtgcgaaaaaccgcccgccatgacgccagaacaggcgcgggaaatgtgcgataccgcgcgcaaactgggcaaggtgctggcctacgactttcaccatcgttttgcgctcgatacgcaacagctgcgtgaacaggtgaccaacggcgttttgggagagatttacgttaccaccgcccgcgccctgcgtcgctgcggcgttcccggctggggtgtctttaccaataaagaactgcagggtggtggcccgctgatcgacatcggcattcatatgctggatgctgcgatgtatgtgctgggctttccggcggtgaaaagcgtgaatgcgcatagctttcaaaagatcggcacgcaaaagagctgtggtcaatttggtgagtgggatccggcaacttacagcgtcgaagatagcctgtttggcaccattgaatttcataacggcggcattctgtggctggaaacgagttttgcactcaacatccgcgaacagagcattatgaacgtcagcttttgtggtgataaagctggtgcgacgctgtttccagcacatatctacaccgataacaacggtgaattaatgacgctgatgcaacgggaaatagcagacgacaaccgccatttgcgcagcatggaagcctttatcaatcacgtacagggcaagcccgtgatgatagccgacgccgagcaggggtacatcatccagcaactggtggcggcgttgtatcaatccgcagaaacagggacgcgtgtggaattatgaccaggccagtaacgttaagtgaaccccatttcagccagcataccctgaacaagtatgcaagcctgatggcgcaggggaacggctatcttgggcttcgcgccagccatgaagaagattacacgcgccagacgcgagggatgtatctggcggggctgtatcatcgggcgggaaaaggtgaaatcaacgaactggtgaacctgcctgatgtcgtggggatggagattgccataaatggtgaggttttcagcttatcccacgaagcctggcagcgtgagcttgactttgccagtggcgaattacgccgcaatgttgtctggcgtaccagcaacggcagtggttacaccatcgccagccgtcgctttgttagcgcagaccaactgccgctcattgcgctggaaatcactattacgccactggacgccgacgcgagtgtgctgattagtacaggcattgacgccacgcaaaccaatcacggtcgccaacatctcgacgaaacccaggtgcgggtgtttggtcagcatctgatgcaggggagctacaccacccaggatggacgcagtgatgtggccatcagctgttgctgtaaggtgagcggtgatgtgcagcaatgctataccgccaaagagcgccgtttactgcaacataccagtgcgcagcttcatgcaggcgagacaatgacgttgcaaaaactggtgtggatcgactggcgggatgacaggcaagctgctttagacgagtggggcagcgcgagccttcgccagcttgaaatgtgcgcgcagcagagttacgaccaacttcttgcagcaagtacagaaaactggcgtcaatggtggcagaaacgtcgtatcacggtaaatggcggcgaagcgcacgatcagcaagcgttagattatgcgctttatcatctgcgcatcatgacgcctgcccacgacgagcgcagcagcattgcggcaaaaggcttaaccggcgaaggctacaaaggccacgttttctgggatacagaagtatttttgttaccgtttcatctgtttagcgatccgacggttgcccgaagtttactgcgttatcgctggcacaacttgccaggcgcgcaggagaaagcgcgacgcaacggctggcagggcgcgctatttccgtgggaaagcgcgcgcagcggcgaagaagagacgccggaatttgccgccattaacattcgcaccgggctgcggcaaaaagtggccagcgcgcaggcggaacatcatctggtggccgatatcgcctgggcggttattcaatactggcagaccacgggggatgaaagtttcattgcgcatgaaggcatggcgctacttctggagacggcaaagttctggattagccgcgcggtgagagttaacgatcgtctggaaattcatgatgttattgggccagacgaatataccgaacatgtcaataataatgcatacaccagctatatggcccgctacaacgttcaacaggcgctgaatattgcccgccagttcggctgtagcgacgatgcgtttatccatcgcgccgaaatgttcctcaaagagctatggatgccagaaattcagcccgacggcgttttgccgcaggatgatagctttatggctaagccggcgattaatctggcgaaatacaaagcggcggcggggaagcaaaccatactgctggattatagtcgcgcagaagtgaacgagatgcagatcctcaaacaagctgatgtggtgatgctcaattacatgctgccggagcagttcagtgcggcaagctgtcttgccaatctgcaattttatgaaccgcgcactattcacgacagcagtttaagtaaagcaatccacggcattgttgccgcacgctgtggcctgctgacccaaagttatcagttctggcgcgaggggactgaaatcgatcttggtgctgatccgcatagttgtgatgatggtatccatgctgccgcaactggcgctatctggctgggggcgattcagggttttgccggggtgagcgtgcgtgacggtgaattgcatctcaatccggcgttacctgagcagtggcaacagttgtctttccctctgttctggcagggctgcgaattacaggtcactcttgacgcgcagcgtattgcgattcgaacttctgcgcccgttagtctgcgtttgaacggtcagcttataaccgtggctgaagaatctgttttctgtttgggtgattttattttgcccttcaatgggaccgctaccaaacatcaggaggatgaatgaaactgcaaggggtaattttcgatctggatggtgtaatcaccgataccgcgcatctgcatttccaggcgtggcagcagattgccgctgaaattggcatcagcattgatgcgcagtttaacgaatccctaaaagggatcagccgcgatgagtctctgcggcgcattctgcaacacgggggcaaagagggcgactttaacagccaggagagggcgcaactggcgtatcgcaaaaatctgctctatgtccacagtctacgcgagttgacggtcaacgctgttctacccggcattcgctctttgctggcagatctccgtgcacagcagatcagcgttgggctggcttctgtctccctgaatgcgccgacgattttagcggcgctggagctgcgcgagtttttcaccttctgcgcggatgcttcccaacttaaaaacagcaaaccggacccggaaatctttctcgccgcctgtgcagggctgggcgtgccgccgcaggcatgtatcggcattgaagatgcgcaggcgggcattgacgccattaacgccagcggtatgcgcagcgtggggatcggcgcgggcttaaccggggcgcaattactgttgcctagtacggaaagtctcacctggccgcggttaagcgccttctggcaaaacgtataacaaaggaatcaacatggctcagcttagcttacaacatattcaaaaaatctacgataaccaggtgcatgtggtgaaggacttcaacctggaaattgccgataaagagttcatcgtgtttgtcggcccgagcggctgcggtaagagcaccaccctgcgcatgattgccgggcttgaggagatcagcggcggcgatctgttgatcgacggcaaacgaatgaatgacgttccagccaaagcacgcaatatagcgatggtgttccagaactacgcgttgtatccgcatatgacggtttacgacaacatggcgtttggtctgaagatgcaaaaaatcgccaaagaggtgattgatgagcgggtgaactgggcggcgcaaattctcggcctgcgtgagtacctgaaacgtaagccgggggcgctttccggcgggcaacgtcagcgagtggcgcttgggcgggcgattgtacgcgaagcgggcgtgtttttaatggatgaaccgctctctaaccttgatgccaagctgcgcgtgcaaatgcgcgcagagatcagcaagctgcatcagaaactgaacaccaccatgatctacgtgacccacgatcagaccgaagcgatgaccatggcgacgcggattgtgattatgaaagacgggattgttcagcaagtaggtgcgccgaaaaccgtttataaccaacccgcgaatatgtttgtttccggatttattggaagtccagcgatgaattttattcgcggcacgatcgatggcgataaattcgttacggaaacgcttaaattaaccattcccgaagagaaattagcggttctgaaaacacaggaaagtttgcataagcccatcgtgatgggaatacgaccggaagatattcatccggacgcgcaagaggaaaataacatttccgccaaaattagcgtggcagaattaaccggtgcggaatttatgctctacaccacggttgggggcacgagttaaacggttgggggcacgagttagtggtccgtgctggtgcgttaaatgattatcatgcaggagaaaatatcactattcattttgatatgacgaaatgtcatttctttgatgcagaaacggaaatagcaattcgctaaatacagggggaaggcattcccccaggataatacaaggaacaataatgaaaaagttattaccctgtaccgcactggtgatgtgtgcgggaatggcctgcgcacaggccgaggaaaggaacgactggcactttaatatcggcgcgatgtacgaaatagaaaacgtcgagggttatggcgaagatatggatgggctggcggagcctagtgtctattttaatgccgccaacgggccgtggagaattgctctggcctattatcaggaagggccggtagattatagcgcgggtaaacgtggaacgtggtttgatcgcccggagctggaggtgcattatcagttcctcgaaaacgatgatttcagtttcggcctgaccggcggtttccgtaattatggttatcactacgttgatgaaccgggtaaagacacggcgaatatgcagcgctggaaaatcgcgccagactgggatgtgaaactgactgacgatttacgtttcaacggttggttgagcatgtataaatttgccaacgatctgaacactaccggttacgctgatacccgtgtcgaaacggaaacaggtctgcaatataccttcaacgaaacggttgccttgcgagtgaactattatctcgagcgcggcttcaatatggacgacagtcgcaataacggtgagttttccacgcaagaaattcgcgcctatttgccgctgacgctcggcaaccacagcgtgacgccgtatacgcgcattgggctggatcgctggagtaactgggactggcaggatgatattgaacgtgaaggccatgattttaaccgtgtaggtttattttacggttatgatttccagaacggactttccgttagcctggaatacgcgtttgagtggcaggatcacgacgaaggcgacagtgataaattccattatgcaggtgtcggcgtaaattacagcttctgataatgggctaaattgccggatgcggcgcgagtactttatccgatctataaatgtaggccggataagatgcgctagcatcgcatctggcattcaggcaaggtagctggtatttatttcagcgtcatatgcgtggcaacggtaatattctgtggactcggttttccagaaattaagcggaataataactcgcagctttgttgacctaactcctgcgtcggaacatcgatgccgcccggtgcaggcgttaaaataaaactcagcgtttcattgctataacccaccaccgctaactgctgcggaatagcaatatttttctctgctgccgcacgataaatgctcattaatttcaggctgtcagtggcaaacaccgcctcaggcaacggactctggcttaataattgccgtgctgcttttaatgcagtttcatgggtataaccgccatcaacaatccattcatcacgcactgcaatattatgcgcagccaggctctgcttataaccattaacgcgatcaacgctaacatggacatcaagcggagcatgcaggcaggcaatattttgatgcccactttcaattaatgcatcggtcaacgcaatgctgtcgccaaaattatcggtatcgacagaataaacatgggcatattgaccttcaactttgccaatcaccaccaccggaatatcatatttatcgagttgggcaaaaaaactctcatccgctgggctactgagcataataatgcctttaatcattttctgcttaattttgctttcgcatttttgcagatcttctgccggattgtggctcgtttgtaatatcacgtcgaaaccttcttcttcagctttggcggtgatggcatgcaaaacttcagagaaaaacggattacccgccgtagttttggtgctacgggtagaaatcaccataatggcatcaaaaccgctagaggtcagcgcgcgggccagcttgtttggctgatactgtaattcttcaatggcccgtaacactttttcgcgcgcttccggggagatattagtttgcttattcagcacgcgacttacggtggatttacttacgcctgcaaccctggcaatatcataaatagtaggggacataggtcaggaactccgtccgaacgtgaatgctgcacatcttatggagttcgccggtcgatgacaacacgggcagttgataatcaatggcctggcccccacattcatatccttacgaatgattttttttctggtcttcagagcagcacaggacagcaatgaagcgacttaaaaatgaactcaatgcgctggtgaatcggggtgtcgacagacatctgcgcctcgctgtaaccggacttagccgcagcggcaaaacagcgtttatcaccgcgatggttaatcagttgcttaatattcacgccggagcacgtttgccgctgttaagtgcggtgcgtgaagagcgcctgctgggcgtgaaacgcattccccagcgtgactttggcattccgcgcttcacctatgacgaagggctggcgcagttatatggcgatccacccgcctggccaacgccaacgcgcggcgtcagtgaaatccgcctggcgctacgttttaaaagcaatgatagcctgctacgccactttaaggatacctccacgctgtatctggaaattgtggattatcccggcgaatggttgctcgacctgccgatgctggcgcaggactatttaagctggagccgccagatgacgggcttactcaatggtcagcgcggagaatggagcgcgaaatggcgaatgatgagcgaagggctggacccgctagcgcctgccgacgaaaaccggctggcggacattgccgccgcgtggaccgattatctccaccactgtaaagagcaggggctgcactttattcagcctgggcgctttgtcttgccgggagatatggcaggtgcgcccgcgctgcaattcttcccgtggccggatgtcgatacctggggcgagtccaaactggcgcaggccgataagcataccaatgccggaatgctgcgcgagcgctttaattattactgcgagaaggtggtgaaggggttctataagaatcattttctgcgctttgaccgccagattgtgctggtggattgcctgcaacctctcaacagtgggccacaggcatttaatgatatgcgtctggcactgacgcagctgatgcaaagttttcactacgggcagcgtaccctgttccggcgtttgtttagcccggttatcgataagctattgtttgctgccactaaagcggaccatgtgaccatcgatcagcacgctaatatggttagtttactgcaacaactgattcaggatgcctggcaaaatgcggcgttcgaagggatcagcatggactgcctggggctggcgagtgttcaggcgaccaccagcggcattattgatgttaacggtgagaaaatcccggcgctgcgtggtaatcgacttagcgatggcgcaccgctcactgtttatcctggcgaagttcccgcacgtttgcctggtcaggcgttctgggataagcaaggcttccagtttgaggcatttcgtccgcaggtgatggatgtcgacaaaccactaccgcatattcgtcttgatgctgcgctggaatttttaataggagataaattgcgatgaccgaaccgttaaaaccacgtattgatttcgacggtcctctggaggtcgatcagaatcctaaattcagggcgcagcagacctttgacgaaaatcaggcgcaaaattttgccccggccacgctcgacgaagcgcaggaagaagaggggcaagtcgaagcggtaatggacgcagcgttacgtccgaaacgcagcctgtggcgcaaaatggtgatgggagggctggctctgtttggcgcaagcgttgtcgggcagggtgtacagtggacaatgaatgcctggcaaacccaggactgggtggcgctgggtggatgtgccgctggggcattgattatcggcgctggcgtaggttctgtggtaacagagtggcggcgcttatggcgcttgcgacagcgcgcccatgaacgcgacgaagcgcgtgatttattgcatagccacggcacgggcaaaggccgcgcattttgcgaaaaactggcgcagcaggcgggtattgatcagagccatccggcgctgcaacgctggtatgccagtatccatgaaacgcaaaacgaccgtgaagtggtcagcctgtatgcgcatttggtccagccagttttagatgcccaggcgcggcgcgaaatcagccgtagcgcggcggaaagtacgttgatgattgcggtcagcccgctggcgttggtcgatatggcgtttatcgcctggcgcaatctgcgtttaattaatcgcatcgccacgctgtatggcattgaactggggtattacagccgtttgcgtctgtttaagctggtattgctgaatatcgcttttgccggagccagcgaactggtgcgcgaagtggggatggactggatgagccaagatctcgctgctcgtttgtctacccgcgcagctcaggggattggtgcaggacttctgacggcacgactcgggattaaagctatggagctttgccgcccgctgccgtggattgacgatgacaaacctcgcctcggggatttccgtcgtcagcttatcggtcaggtgaaagaaacgctgcaaaaaggcaaaacgcccagcgaaaaataatgcaatatcgggtgctgaccggatatctttacgccgaagtgcccgtttttccgtctttgtgtcaatgattgttgacagaaaccttcctgctatccaaatagtgtcatatcatcatattaattgttcttttttcaggtgaaggttcccatgcgtctggaagtcttttgtgaagaccgactcggtctgacccgcgaattactcgatctactcgtgctaagaggcattgatttacgcggtattgagattgatcccattgggcgaatctacctcaattttgctgaactggagtttgagagtttcagcagtctgatggccgaaatacgccgtattgcgggtgttaccgatgtgcgtactgtcccgtggatgccttccgaacgtgagcatctggcgttgagcgcgttactggaggcgttgcctgaacctgtgctctctgtcgatatgaaaagcaaagtggatatggcgaacccggcgagctgtcagctttttgggcaaaaattggatcgcctgcgcaaccataccgccgcacaattgattaacggctttaattttttacgttggctggaaagcgaaccgcaagatagccataacgagcatgtcgttattaatgggcagaatttcctgatggagattacgcctgtttatcttcaggatgaaaatgatcaacacgtcctgaccggtgcggtggtgatgttgcgaagtacgattcgtatgggccgccagttgcaaaatgtcgccgcccaggacgtcagcgccttcagtcaaattgtcgccgtcagcccgaaaatgaagcatgttgtcgaacaggcgcagaaactggcgatgctaagcgcgccgctgctgattacgggtgacacaggtacaggtaaagatctctttgcctacgcctgccatcaggcaagccccagagcgggcaaaccttacctggcgctgaactgtgcgtctataccggaagatgcggtcgagagtgaactgtttggtcatgctccggaagggaagaaaggattctttgagcaggcgaacggtggtagcgtgctgttggatgaaataggggaaatgagtccacggatgcaggcgaaattactgcgtttccttaatgatggcactttccgtcgggttggcgaagaccatgaggtgcatgtcgatgtgcgggtgatttgcgctacgcagaagaatctggtcgaactggtgcaaaaaggcatgttccgtgaagatctctattatcgtctgaacgtgttgacgctcaatctgccgccgctacgtgactgtccgcaggacatcatgccgttaactgagctgttcgtcgcccgctttgccgacgagcagggcgtgccgcgtccgaaactggccgctgacctgaatactgtacttacgcgttatgcgtggccgggaaatgtgcggcagttaaagaacgctatctatcgcgcactgacacaactggacggttatgagctgcgtccacaggatattttgttgccggattatgacgccgcaacggtagccgtgggcgaagatgcgatggaaggtagcctggacgaaatcaccagccgttttgaacgcagcgtattaacccagctttatcgcaattatcccagcacgcgcaaactggcaaaacgtctcggcgttagtcataccgcgattgccaataagttgcgggaatatggtctgagtcagaagaagaacgaagagtaagcgcgaatatgcctgatggtgcaacaccatcaggcatattaaattatgctttcagtacagccagagctgcttcgtaatccggctcggtggtgatttcatccaccagctggctgaaaatcacattgtcattttcgtcaataaccacaacggcacgcgctgccagacctttcagtgggccatcagcaattgccacaccgtaagcttgcagaaattcagcgttacggaaagtggagagggtgataacgttgttcagaccttctgcgccgcagaaacgagactgggcgaacggcagatcggcagagatacacagcacaacggtgttgtcgatctcagttgccagttggttaaacttacgtacacttgcggcgcaaacaccggtatcaatactcgggaaaatgttcagcactttgcgtttacccgcaaactgaccgagggtgacgtcagacagatcttttgccacgagagtaaaagtctgcgctttgctacccgcctgcgggatggaattggcgactgtaaccgggttgccctggaaatgaacggtttgactcatgattatctttcctgtttacatatagttaacgtcacacctagtttatgctaactgtcaataacacagcaaacgctattacagggtctccttacaacaactgtcaacgcagtttgtaattaaaagattaacccatatctggtgaatgaaacagtgatgaaccttctgccagatcaataaatcagaaaaatttaatgatatgacagaaggatagtgagttatgcggaaaaatcaggcaacgttacgcgtatgaccagcaagctgggccagcgcatcgttattttcgatggtgatgtatttacctttgactgccagcatgccgcttttctggaagcgacccagcagacggctgatggtttctaccgtcaggcccagatagttaccgatatcgccacgagtcatcgtcaggcggaattcacgaggggagaagccgcgttgggcaaaacgacgggacaggttgtagatgaatgcagccagacgttcctcggcatttttcttgctcaacagcaggatcatgtcctgatcgcctttgatttcaccgctcatcagacgcatcatctgctgacgcagattcggcattttaccggacaaatcgtccagcgtttcgaacgggatttcacataccatgctggtttccagcgcctgcgcgaagctcgggtgatggccgctgccgatggcgtcaaatcccaccaggtcgcctgctaaatggaaaccagtgatttgctcgtcgccttgctcagtgatggtataacttttaatcgtaccggagcggatggcataaaggcttttaagttcatcaccagccttaaacagcgtctggcctttctgaataggcttcttccgctcaatgatattatcaagctgatcaagctcatgttcgttgagtgtgaacgggatgcaaagctggctgatgctgcaatcctggcaatggatagcacaaccgccagactgaatgcgccgtataattcgcttttccgggatcataggtctgctcaagccgtaattgatatttgtcaattttaacatctttttagggagcaagtaagtctaagcaaaccttaacagcagagaattccgatattagatgtaaatatatgtctatctatttgaaaacccttaagttgttaagggtaactttacataaaagtgtgaacaagctggcacaaattgtttaatgtttacagcaaaagataaccttcatggcgcaataaccactcttttcgctgaactccgcctgcatatccggtcatggtgccgtttcggccaataacccgatggcaaggtacgacgatgctgatgggattgcttccgtttgccgcaccaacggcacgcgccgcgccaggacggcccaattgctcagccagttggccgtaatgcattacctgcccgcaggggatagtgcgtagtgttttccagacttcgcgctgaaatggcgtcccccccgtagcagtgggaagcgtatcaataatgctaagattaccggcaaaatattcacgaagcttgtcgcttaaaccgcctggattggtggcagaaatgcgctcatagccttctttgcgataatggatgtccagcagctgcaccatgcgttcgctgtactcttcccattcaaccgcccgcaggcgaaattgctcatcgcaaatcacccacagtggacccagtggcgtggcaattttttcttcaagtaatctcagcatccgttctctcttaagacaaacgtgggtaaatacccggacctatcggcagaccgacaagataccacgccagcacatcgcagccatactatgcagaaacaatgctgtcgatggctgcttttgcgtcagactgtgctttcgctgccatttccggaccgtatgcgatcccttcggcgaagacaaatttcacatcggtaatgccgataaagccgaggaacgtggacagatacggcgtcaccaggtccgttggtccatctttgtggatcccgccgcggctggtaataacgatggcttttttacccgttaccagaccttccggaccgttctcggtatagcggaaagtaacgcctgcgcgggcaaccaggtcaaaatagtttttcaactgagtcgagatgttgaagttatacatcggtgccgcaataacgataacgtcgtgggctttcagctcggcaatcaactcatcggaaagtgccagagcttcctgctgacgcggagtcagcggcgcatcgctcggacgcagagcgccaaccagttcgccatccagtaccggaatcggatttgcagccaggtcgcgaacggtgatttcatcagcggagtgcttttcgcgccattgttcaacaaaataatcggacaactgattagactgagagtaccctgccaggatgctggatttaagaactaataccttgctcatggtgtttccttatagatgtttgaatgggcgatgccccgttgcttgttgacactttattcacaatcctgccacagagatagcgcaataaatcgaagcctatgttcgaatttattgaacaacgcatagaaagccgcgatgtggtactctatatctatcatttaaaagaaaattaatcaggcagactactgcccactaacgttatgacagaacaacaaaaattgacctttacggccttgcagcagcggctggattcgctgatgctgcgtgacagactgcgtttttctcgccgtctgcacggcgtgaagaaggttaaaaatcctgatgcacaacaggccattttccaggagatggcgaaagagattgaccaggcggcagggaaagtcctgctgcgtgaagcggcacgaccggaaattacttatcctgacaatttaccggttagtcagaaaaaacaggacattctcgaagcgattcgtgatcaccaggtggtgatcgtcgccggggaaacgggttctggtaaaacgactcagttaccgaaaatctgtatggagctggggcgcgggattaaaggactgatcggccatacccagccgcgtcgtctggcggcaagaacagtggcgaaccgtattgcggaagagctgaaaacggagccgggcggttgcatcggttacaaagtgcgtttcagcgatcacgtaagtgataacacgatggtcaagctgatgaccgacggtatcctgctggcggagatccagcaagaccgcctgctgatgcagtacgacactatcattattgacgaagcgcacgaacgcagcctgaatatcgattttttgctcggctatttgaaagagttgctgccgcggcgtcctgacctaaaaatcattatcacttccgcgactatcgacccggaacgctttagccgccactttaataatgcgccgattattgaagtctccggtcggacctatccggtggaagtgcgctatcgcccgattgttgaagaagccgatgacaccgagcgcgatcagttgcaggcgatttttgacgccgtagacgaactgagtcaggaaagccatggcgacattctgatctttatgagcggcgagcgggaaatccgcgataccgccgatgcgctgaacaagctgaacttacgccataccgaaatcttgccgctttatgcgcggcttagcaacagcgaacaaaatagggtattccagagccacagcggacggcgcattgtgctggcgaccaacgtcgcggaaacgagcctgaccgtaccggggattaaatacgttatcgaccccggtacagcgcgtatcagccgctacagctatcgcaccaaagtgcagcgtttgccgattgagccgatttcccaggcgtctgccaatcagcgtaaaggccgctgtggtcgtgtgtccgaagggatctgtattcgtctctattccgaagacgatttcctcagccgcccggagtttaccgatccggagattctgcgtaccaacctggccagcgttattttgcagatgaccgcgctggggctgggcgatatcgctgcgttcccgtttgtcgaagcaccggataaacgcaatatccaggatggcgtgcgtctgctcgaagagctgggcgcgatcaccactgatgaacaggccagcgcctataaactgacgccgctcggtcgccagctcagccagttgcctgtcgacccacgtctggcgcgtatggtgctggaagcgcaaaaacatggctgcgtgcgtgaggcgatgattatcacgtccgcgctctccattcaggatccgcgcgaacgtccgatggacaaacagcaggcaagcgacgaaaaacatcgtcgcttccacgacaaagagtctgactttctcgcgtttgtgaatctgtggaattatcttggcgagcagcaaaaggcgctttcttccaacgccttccgtcgcctgtgtcgtaccgattatctcaactatctgcgcgtgcgcgaatggcaggatatctacacccagttgcgtcaggtggtgaaagaacttggcattccggttaacagcgaaccggcggagtatcgcgaaattcacattgcgttgctgaccggtttactttcccatatcggcatgaaagatgccgataaacaagaatataccggcgcacgtaacgcgcgtttctccatcttccccggttctggtttattcaaaaaaccgcctaaatgggtaatggtggcggaactggtagaaaccagccgcctgtgggggcgcattgctgcgcgtatcgacccggaatgggtggagccagttgctcagcatttgattaaacgcacctacagcgaaccgcactgggaacgggcgcagggcgcggtgatggcaacggaaaaagtcactgtttatggtttgccgattgttgccgcgcgcaaggtcaactacagccagatcgatccggcgttatgtcgtgaactctttattcgccacgcgctggtggaaggtgactggcagacgcgtcacgcattcttccgtgaaaacctgaaactacgggcggaagtagaagagctggaacacaaaagtcgtcgccgcgatattctggttgatgacgaaacgttgtttgagttctacgaccagcgcatcagccacgatgtaatctccgctcgccacttcgacagctggtggaaaaaagtcagccgcgaaacgcctgatttgctcaactttgaaaaaagcatgttgatcaaagagggcgcagaaaaaatcagcaagctggattacccgaacttctggcatcagggcaatctcaagctgcgtttgagctatcagtttgagcccggcgcggatgctgacggtgtgaccgtacatattccgctgccgttacttaaccaggttgaggaaagcgggtttgaatggcagatccccggtctgcgccgcgaactggtgattgctctgattaaaagcttgccgaaaccggtacgccgtaattttgtacccgcgccaaactatgccgaagcgtttttaggccgcgtcaaaccgctggagttaccgttgctcgacagccttgagcgcgagttacggcggatgaccggcgttaccgttgaccgcgaagactggcactgggatcaggtgcccgatcacctgaaaattaccttccgcgtggtggatgacaaaaacaagaagctaaaagaagggcgcagcctacaagatctgaaagatgcgctgaaaggcaaagtgcaggaaacgctatctgcggtggcggatgacggtatcgagcagagcggcttacatatctggagttttggtcagctgccggaaagctacgaacagaagcgtggcaactacaaagtgaaggcgtggccggcgctggtggatgagcgcgacagtgtggcgatcaaactgtttgataacccgctggagcaaaagcaggcaatgtggaacggtcttcgccgtctactgctgctgaatattccaagcccaatcaaatatttacatgaaaagttaccgaacaaagccaagctgggactgtactttaacccgtatggcaaagtgctggagctgatcgacgactgtatctcctgcggtgtggataaattgatcgacgccaatggtggcccggtctggacggaagaaggctttgctgcgctgcatgaaaaagtgcgtgccgaactgaacgacacggtggtggatattgcgaagcaggtcgagcaaatccttacggcagtgttcaatatcaacaaacgtctgaaagggcgggtggatatgaccatggcgctggggctttctgacattaaagcgcagatgggcgggttggtatatcgcggttttgtcactggtaacggcttcaaacggctgggcgacacgctgcgatatttgcaggcgattgaaaaacggctggaaaaactggcggttgatccacatcgcgaccgtgcgcagatgctgaaagtcgaaaacgtccagcaggcgtggcagcaatggatcaacaaactgccgcccgcacgtcgtgaggatgaagacgtgaaagagatccgttggatgatagaagagttgcgcgttagttacttcgctcaacaacttggtacgccttatccgattagtgataagcgtattttgcaggcgatggagcagattagcggttaaccctgctatttgcctgataaagaaaaaacccggtaagcatttagcgccgggttttttattaattctaaaacggtaagggtaaaaattcaggaattcagaaaaatacaattctctgctgcaagatgaataatgtttatctacagcatttccttaaaagatatgtcaggcttgcggagtggcggttaaggacatacgatttcctcctttcagagtgctccgcttctcactattatctcacgcagtattcttaagggaacgataaggaggaaccatgaacattaccccgtttccgacgcttagcccggcaactatagatgccataaatgttatcggacagtggctggcgcaggatgatttctccggtgaggtgccgtatcaggccgattgcgtgatccttgcaggcaatgcggttatgccgactatcgatgcggcatgtaagattgcccgcgatcagcaaattcctttactgattagtggtggtatcggtcacagcacaacttttttgtatagcgccatcgcacagcatccgcactacaacactatccgcaccactggcagagcagaagcgaccatcctggcggatatcgctcatcagttctggcacattccgcatgaaaaaatctggattgaagaccagagtacaaactgcggtgaaaacgcacgctttagcatcgcgctattgaatcaggccgtagaacgagttcatacggctatcgttgttcaggaccccaccatgcagcggcgcacgatggcgacgttccgccgtatgactggggacaatcccgatgcaccacgctggttaagttatcccggattcgttcctcagttaggaaataacgcagacagtgtaatctttattaatcagttacaaggattatggccagttgagcgttatctcagtctactcactggcgagctgccgcgtttacgcgatgatagcgatggctacggtccccgcgggcgagattttatcgttcacgttgattttccggcagaagtcatccatgcatggcaaacgctgaaacatgatgcggtgctcatcgaggcgatggaaagtcgcagcttacgttaaaaattgcccgtttgtgaaccacttgtttgcaaacgggcatgactcctgacttttatttctgccttttattccttttacacttgtttttatgaagcccttcacagaattgtcctttcacgattccgtctctctgatgattgatgttaattaacaatgtattcaccgaaaacaaacatataaatcacaggagtcgcccatgagtgtacccgttcaacatcctatgtatatcgatggacagtttgttacctggcgtggagacgcatggattgatgtggtaaaccctgctacagaggctgtcatttcccgcatacccgatggtcaggccgaggatgcccgtaaggcaatcgatgcagcagaacgtgcacaaccagaatgggaagcgttgcctgctattgaacgcgccagttggttgcgcaaaatctccgccgggatccgcgaacgcgccagtgaaatcagtgcgctgattgttgaagaagggggcaagatccagcagctggctgaagtcgaagtggcttttactgccgactatatcgattacatggcggagtgggcacggcgttacgagggcgagattattcaaagcgatcgtccaggagaaaatattcttttgtttaaacgtgcgcttggtgtgactaccggcattctgccgtggaacttcccgttcttcctcattgcccgcaaaatggctcccgctcttttgaccggtaataccatcgtcattaaacctagtgaatttacgccaaacaatgcgattgcattcgccaaaatcgtcgatgaaataggccttccgcgcggcgtgtttaaccttgtactggggcgtggtgaaaccgttgggcaagaactggcgggtaacccaaaggtcgcaatggtcagtatgacaggcagcgtctctgcaggtgagaagatcatggcgactgcggcgaaaaacatcaccaaagtgtgtctggaattggggggtaaagcaccagctatcgtaatggacgatgccgatcttgaactggcagtcaaagccatcgttgatagtcgcgtcattaatagtgggcaagtgtgtaactgtgcagaacgtgtttatgtacagaaaggcatttatgatcagttcgtcaatcggctgggtgaagcgatgcaggcggttcaatttggtaaccccgctgaacgcaacgacattgcgatggggccgttgattaacgccgcggcgctggaaagggtcgagcaaaaagtggcgcgcgcagtagaagaaggggcgagagtggcgttcggtggcaaagcggtagaggggaaaggatattattatccgccgacattgctgctggatgttcgccaggaaatgagcattatgcatgaggaaacctttggcccggtgctgccagttgtcgcatttgacacgctggaagatgctatcagtatggctaatgacagtgattacggcctgaccagtagtatctatacccaaaatctgaacgtcgcgatgaaagccattaaagggctgaagtttggtgaaacttacatcaaccgtgaaaacttcgaagctatgcaaggcttccacgccggatggcgtaaatccggtattggcggcgcagatggtaaacatggcttgcatgaatatctgcagacccaggtggtttatttacagtcttaatgagtgaaagaggcggaggttttttcctccgcctgtgcgcgtcagagtttagcgaatttttcgagggtgcgaataagctgtgtgacgaagccatattcgttatcgtaccaggcgaccgttttcaccagttgtaaatcgcccacggcggtaatttccgtttgcgtggcatcaaacaccgaaccgaaatggctgccaatgatatcggaagagactatttcttcatcggtataaccaaatgactcgttattggtggttgcttgtttaagtgcgttattcacctcttcggcagtcacttttttccgagaatcgataccagttcagtgaccgaacctgttttcaccggcacgcgttgcgcatgacctttcagtttgccgctcagttccgggatcaccagaccaatggcttttgccgcccccgtagtgtggggaatgatattttctgccgctgcgcgtgaagcacgtaaatctttaccacgcgggccatccaccagtgactgggtgccagtataggcatgaatggtcgtcatcgtgccgacttctatcccgaaactgtcatgcaaggctttggccatcggcgcaagacagttagtggtgcatgacgccacggaaacaatggtgtcgttgccatccagagtgtcgtcattgacgttataaacgatagttttcatttcaccggcaggggcggaaatcaacaccttcttcgcaccagcatcaagatgcgcctgcgatttctcggcggaggtataaaagccagtacattcgacaatgatttctgcacctttcgctttccacggaatatttttagcctctttttcggcgtaaaccgcgatacttttcccatcaacgataagtgaatcttccgtaaaatcaacgctccaggggaatggtccgtagtttgaatcatgtttcagcaggtaggcgagaatttatggggaagtgagatcattaatagcgacaacgtctatgttgcttttgacttcaagtaatcgacccaacaccagtcgaccgatacgaccaaaaccgttaataccaactttactcatggttttctcctgtcaggaacgttcggatgaaaattgatcctttccaagcttagaccaggatggcgggatgggcaatctccattctcacagtgaaacgtaacgtactgaaaacgggtgaacaatatttaatgaaattttgagaaaagcccgttatgttaacggaaaattatgttaaagcaggaaatgttatggaaaataaatatagtaggttacaaatcagcattcactggctggtctttttactggttatcgcagcgtattgcgcaatggagtttcgtggtttcttcccacgtagcgatcggccactcatcaacatgattcatgtttcctgtggcatcagtattctcgtgctgatggtcgttcgtcttttgttaaggctgaaatacccaaccccgccgattatacctaagccaaaaccgatgatgacgggactggcgcatttgggacatttggtgatttatctcctgtttattgcgctgccagtgattggtttggtgatgatgtataaccggggcaacccgtggtttgcgtttggtttgacgatgccttacgctagtgaggccaatttcgaacgggtagatagcttaaagagctggcatgaaacgctggcgaatctgggatattttgtcatcgggttgcacgctgcggctgcactggcacaccactatttctggaaggacaacacacttctacgcatgatgccgcgtaaacgttcctgaaggatatttaaagaaaacgcctgtactaaaaccgacccgtggtacaggcgaagaatacgggtctacatcggaagcgcctattatatttatttgtatgataaataaaaccataatccttgcccatacgtccatctggcttatttttaatcaattcacccgatctttgatctcatcaacggtatcaaaataaaccagcgtataacgttcaaatcgaacataagattcgataaaccatggaggttatatgaaaaaactggcacttattttgtttatgggaacgcttgtttccttttatgccgatgccgggcgcaaaccctgttctggtagcaaaggggggatcagtcactgtacggcaggcggcaaatttgtctgtaatgatggttctattagtgcaagcaaaaaaacatgcactaactgaagtgtaaaaggggtgccatgagaaaatgaatctgctagtcaaatgcgcggggaaaatccccgcgcttgcccttacctggacgtgcaggccatgagcgcagcaacctccttatcaccgtcccggaaccgcagttcgtagagcgtttgtcgggtcaggagtgtgaatgtcagaatcgtaatgcagataatgagcagacacaccaccagagggttgtgcttcatagcctttctccttgccggatggcgggtaagaggctaagatctgaattgctaggttcattcgttggcctcggttgatagaaatatcggtcggggccttcgtctttctgattcccggttagcctgaaaacagaaagtctcaggcacccgcaggcatcctatgaggtttccttagggacgaaaataatcacttcacgaaattgcgtgctgttttccagaatttttcgtcattcgggttagccagtttagccattcgttactctcttcattccaatagcattaattttctatgcaataattgttgtaaaaatgtgacgcaaagaggtttttggtcataagtaattaccgtcaagtgccgatgactttctatcaggagtaaacctggacgagagacaacggtaatgaatacaactcccagtcagcgattaggttttttgcatcacatcaggttggttccgttatttgcctgcattctaggcggtatcttagttctattcgcattaagtagtgccctggctggctatttcctctggcaggccgatcgcgatcagcgtgatgttactgcggagattgagattcggaccgggttagcgaacagtagtgattttttgcgtagtgcccggatcaatatgattcaggccggggctgcgagtcgtattgcggaaatggaagcaatgaagcgaaatattgcgcaagccgaaagcgagattaaacagagccagcaaggttatcgtgcttatcagaatcgaccggtgaaaacacctgctgatgaagccctcgacactgaattaaatcaacgctttcaggcttatatcacgggtatgcaacctatgttgaaatatgccaaaaatggcatgtttgaagcgattatcaatcatgaaagtgagcagatccgaccgctggataatgcttataccgatattttgaacaaagccgttaagatacgtagcaccagagccaaccaactggcggaactggcccatcagcgcacccgcctgggtgggatgttcatgattggcgcgtttgtgcttgccctggtcatgacgctgataacatttatggtgctacgtcggatcgtcattcgtccactgcaacatgccgcacaacggattgaaaaaatcgccagtggcgatctgacgatgaatgatgaaccggcgggtcgtaatgaaatcggtcgcttaagtcgtcatttacagcaaatgcagcatagtctggggatgacagtagggactgttcgacagggcgcggaagagatttatcgtggcaccagcgaaattagtgctggcaatgcggacctgagttctcgcaccgaagaacaagcggcggctatcgaacaaactgccgccagcatggagcaactcactgcgacggtgaaacagaatgcggataacgcgcatcatgccagcaaactggcgcaagaggcttctattaaagccagcgatggcgggcagacggtttccggtgtagtaaaaacgatgggcgctatctccacgagtagcaagaaaatttctgagatcaccgccgtcatcaacagtattgctttccagacgaatattctggcactgaatgctgccgttgaagccgcgcgagcgggtgagcaagggcgtggatttgccgttgtcgccagcgaagtacggacactcgcaagtcgcagcgctcaggcggcgaaagagattgaaggcttgatcagtgaaagtgtcaggttaattgacctggggagcgatgaggtggcaacggccgggaaaaccatgagcactattgttgatgccgtcgcgagtgtcacacatatcatgcaggaaatcgccgccgccagcgatgaacaaagtagaggcataacgcaggttagccaggcgatttctgaaatggataaggtgacgcaacagaatgcttctctggtagaagaggccagtgcggcggcggtgtcccttgaagaacaggcggcacgattaactgaggcggtggatgtattccgtctgcacaaacattctgtgagcgcagaacctcgcggagcgggtgaaccagttagtttcgctacggtgtgaaaatgttcaaggagggatcgacagatcccttcacctttcagaacggcatactttttcgaatagcgttaatcatcaactggcaaccagaagagaacgtcgcatctacgcgggtcagtattccaatcggttcgcctgcaccatgtcccggaacaggcagggccaccagcgtggcatgacgcaggtcgtcttttacagcgccagaagggacaaaccacacgtaatcgtattcaaccgtaagttgacgagataggctagcagacagcgtttcgatacaaccgctaggaattttacagccctggctctgcactaatgcatcactatgctggcgtggcgcagtgccttctggacttacaacgaccggccattccagcacccggcttagcgttacgttctcctgaagtagcgggtgattagggcggacaaccagcttcaagctttcaagaaacagcagttcgtaattaagcccggtcatcagttcaggatcactcatccgaccaatgccgatatcgatttccccggtttttaaacccgccagaatcatagggttactcattgtcgcaacttgcaaggtcgtctctttttgttgctgatgaaactgacctataacgctaggtaatatccccagtgccgcagtaggtagtgcaccaaccctgacgacatcattattaagaccttctttacgatgaaggctccgtccggcagtgttgatggcgtcaagaactctgactgcatgcgttaaaaattgttcgccgggtaaggtaagttgcgccccctgacgaccacgctcaaacaagcgagcgccagtcagctgctccagttcattcaatgtcttagagagcgcaggttgactcaaattaagggtttcagccgcgcgccccaaagttccttgttgtgcgacagctacgaatgtatgaaggtggcgcaaacggatgcgctgactaaacagactatttttttccataagcgatgttaaaaacgaagcggtgtcgctgacaagtgaagttgtttgattatgataacttgattgcaaaatattattaacaattaaagcaattatgttacagcaaaatggataatattgatgttttcgcggcgagatcacagtttgtaaattcttcccgcaagagtgaatgcggttacctacactccagattactgaccactggaggcagacactatggcgaacagcatcacggcggatgagattcgggaacagtttagccaggcaatgagtgccatgtaccagcaagaagttccgcaatatggcacgctgctggaactggtagctgatgtgaatctggctgtgctggaaaacaatcctcaactgcacgaaaaaatggtaaatgcagacgagctggcgcgactgaatgttgaacgtcatggggcgattcgcgttgggactgcacaagagcttgctactcttcggcggatgtttgccattatggggatgtacccggtgagctattacgatctcagccaggcaggggtgccggtacatagcacagcatttcggcccattgatgatgcttctctggcgcgtaatcccttccgcgtttttacctccttactccgccttgagcttatcgagaacgaaattttgcgccagaaagcggcggagattctgcgtcagcgcgatatcttcaccccacgttgtcgacaactgttagaggaatatgagcagcagggcggttttaacgaaacacaggcacaggagtttgtgcaggaagccctggaaacgtttcgctggcaccagagtgcaacggtagatgaagaaacctatcgcgcattgcacaacgaacatcggttgattgctgatgtggtctgttttcctggatgccatatcaaccacctgacgccacgtacgctggatattgaccgggtgcagagcatgatgcctgaatgcggaattgaacccaaaattctcatcgaggggccgccgcgccgcgaggtaccgattttactacgccagaccagctttaaagcactggaagagacggtgttgtttgcggggcagaaacagggcacgcataccgcgcgctttggtgaaattgagcagcgtggcgtggcattaacgccgaaagggcgacaactgtatgatgatcttctgcgtaacgctggaaccgggcaggataatctcactcaccaaatgcatttacaggaaaccttccgcacttttcctgacagtgagtttttaatgcgtcagcaagggttggcatggttccggtaccgtctgacgcctagcggtgaggcgcatcgtcaggcgattcatcctggagacgatccacagcccttaattgaacgtggttgggtagtggcgcaacccatcacctatgaagatttcttgcccgttagcgcggcggggatcttccagagtaatctgggtaatgaaacgcagacacgcagtcacggtaatgccagtcgcgaagcatttgagcaggcgttgggttgtccggttttggatgagttccagctttaccaggaagcggaagaacgcagtaaacgtcgctgtggtttgctttaaaatctgaccatccgcctttgcaaaaatttgcctgattttacaaacgaatcaggctcatcccatcgacataaaaaaaatgccgatttatgcatattctctcagttcaacaattggattattaataaatattgtctagagtgagcggtcataaataagcactttcttgccgctgaaaacgaccagcgcgggaccattcacaacaccagaaggactcactttcaggtatggatcgtagacgatttattaaaggttcaatggctatggccgccgtgtgcggtaccagcggcattgcttctcttttttctcaggcggcattcgcggcagattctgatattgccgacgggcaaacccagcgttttgacttctccattctacagagtatggcgcacgacttagcgcaaacagcgtggcgtggtgcgcctcgtccgttacctgacacgctggcgacaatgacgccgcaggcttataacagtattcaatacgacgccgaaaaaagcctctggcataacgttgagaaccgtcaactggacgctcagttcttccatatgggaatgggattccgtcgccgcgttcgtatgttttctgtagatccagcaacacatctggcgcgtgaaattcactttcgcccggagttgttcaaatacaacgatgcaggtgttgatacaaaacaattagaagggcaaagcgatctcggctttgccggttttcgcgtgtttaaagcccccgaactggcgcgccgtgatgtagtaagttttctcggcgcgagttatttccgcgccgttgatgatacatatcaatacggtttgagcgcccgcggcctggcgatcgacacttacaccgacagtaaagaagagttccccgactttaccgccttctggtttgatacggtaaaaccgggggcaactacctttaccgtttatgcgttgctcgatagcgccagcattactggtgcctataagttcactatccattgtgagaaaagtcaggtgattatggatgtggaaaatcacctgtatgcgcgcaaagacattaaacagctgggcattgcgccgatgaccagtatgttcagctgcggtactaatgaacgtcggatgtgcgatacaattcatccgcaaattcatgactctgatcgtctgtccatgtggcggggcaacggcgagtggatttgccgtccgctgaataatccgcaaaaattgcagttcaatgcttacaccgacaacaacccgaaagggtttggtttattgcaactggatcgtgacttctcccattatcaggacattatgggctggtataacaaacgcccaagtctgtgggtggaaccgcgtaacaagtggggtaagggcaccatcggcctgatggaaatcccaacaacgggcgaaacgctggataacattgtctgcttctggcagccagaaaaagctgtaaaagcaggtgatgagtttgcattccagtatcgtctgtactggagtgcgcaaccgcctgttcattgcccattagcgcgcgttatggcgacgcgtaccggcatgggcggtttcagcgaaggttgggcgccaggtgaacactatcccgaaaaatgggcgcgtcgttttgccgtcgatttcgttggtggtgatctgaaagctgccgcgccaaaaggcattgagccggtgattacgctttccagtggggaagcgaagcaaatcgaaattctctatattgaacccatcgatggttatcgtattcagtttgactggtatccgactagcgactccactgatccggtcgatatgcggatgtatctacgttgtcagggggacgctatcagtgaaacatggctgtatcagtatttcccgccagcgccggataaacgtcagtatgttgacgaccgcgtgatgagttaatcgttttttcttcggcaccttcttcgggaggtgccgtctggttaaacacgatcccgctcgcatttttccctaagttaaatgagtaatctgatggtgtgtatttcagatacaccttgtcagccactaacagggagtgcgtatgtttccagaataccgagatttaatatcccgtctgaaaaacgaaaatcctcgctttatgtccttgttcgataaacacaataaacttgatcatgaaattgccagaaaggaaggttccgacggtcgagggtacaatgcggaagtggtccgcatgaaaaaacaaaagctacagttaaaagatgagatgctcaaaatcctgcagcaggagagcgtcaaagaggtgtaaactttcctaagccgccagccaggcggcttttttaacaactgcatggattgactggagataagatgactgaaacgataaaagtaagcgaaagtcttgaattacatgctgttgcagaaaatcacgtcaaacctctttatcagttaatctgtaaaaataaaacctggttacagcagagcctaaactggccgcagtttgttcaaagtgaagaggacacgcgaaaaacggtgcagggtaatgtgatgttgcatcaacgcggctatgccaaaatgttcatgattttcaaagaagatgaacttatcggcgttatcagctttaatcgtattgaaccactgaataaaaccgctgaaataggctactggctggacgaatctcatcaggggcaggggatcatttctcaggcgctgcaggcattgattcatcattacgcccagtctggtgaacttagacgcttcgtgatcaaatgtcgggtggacaatccgcaaagcaaccaggtcgctttgcgcaatggttttatccttgaaggttgcctgaaacaggctgagttcctgaatgatgcctatgatgatgtgaacttatacgcgcgtattatcgatagtcaataatcacaataaccctgccagcggcgttcgcgtaatgcgctcctcgccgttaatgacttttggaccacggacatgaaccgtgtcgccatcaaaggcttcaacgacggcgtggtcggttaactccacatggttttcaattatcaccgcacctgtaatacggctctcaccttgtatgacaacgtgctcgtcgagcagaatcggtccgccacgtaccacggcatttccgccaaccaagacatgatgttttaacacacaattaccttccacaatggcatattccgccacctggctactgtaatgaatcgtcggaatggcatcttcttctatgccagctttcacctgcgcgtgaccgtagactttagcgcaatcgcatagccagacattgttctcttcattaccttcaatactggcaaaatcaaaaacttcggcgcgatgttcaataaaagcataccggacgacggcatcgccataaatttgtgcctggtggacaatacggctggcgctaacccttgcgcgatcataaatttggagcaggagttgatggtcgggcgttaagccttgtgcggcgacgatcatagaatgttgatcaattaaggcgtgaccaaatattctacattgcccgtaaactaaactgtcatgaatggtgacgctgtcacttatatatgcaccctggctgatttcactattatcgatccagacgttatccgttgcgtaaacctctccccacagcacgctggtgccggtgatacgcgtattaccggaaatcaccgctccgccgaacgcaatagcattctggtcgtaaatccagcaatttccttcttgtgctaacaccgtttcgcgatcgatccagccgccagcggttcctgctatcacatcgttaaaatcgctaatggcgataatctgccgtaataacacattttttttagtgccatcttcctgataactaaaggctcgctgttcttcacttagacgatatttgcgcatagcgttttcccacaggtgacttactataaccgtagcaaattctgcggctctggctatgctcgagaaaattccataaaatgcatttcaaatatactttataaattaaacaaaatgagtaagaagatgcagagcgataaagtgctcaatttgccggcaggctactttggtattgtgttggggacgatagggatgggatttgcctggcgctatgccagccaggtttggcaggtcagccactggttaggggatgggctggtgattctggcgatgatcatctggggattattgactagcgcatttattgcccgactcatacgctttccgcatagcgtgctggcggaagttcgccatccagtgctgagcagttttgtgagtttgtttccggcaacgacgatgctggtggcgattggttttgttccgtggtttcgcccactggcggtgtgcctgttcagttttggtgtcgtggttcagttggcttatgccgcctggcaaactgcgggattatggcgcggatctcaccctgaagaagctaccacgcctggactgtatctgccgacagttgccaacaactttatcagcgcaatggcctgtggtgcgttgggctacaccgacgccggtctggtgtttttaggcgcaggcgttttcagttggctaagccttgaaccggtgatcttgcagcgtctgcgcagtagcggagaattacccacggcactgcggacaagtctcggcattcagctcgctcctgcgctggtggcttgtagtgcctggctgagcgtcaacggcggcgagggtgacacgctggcgaaaatgcttttcggttatggactgctgcaactgctgtttatgctacgtctgatgccatggtatctctcccagccatttaatgctagtttctggagtttcagcttcggcgtatctgcactggcaaccaccggtttgcatctggggagtggcagcgataatggatttttccatacgctggcggtgccgctgtttatctttaccaattttattattgcaatactgctcatccgtacttttgcgcttctgatgcagggaaaattgttagtcagaaccgagcgcgccgttttaatgaaagcagaggacaaagaatgatcattcgtgacgaaaactattttactgataaatatgaattaacccgcacacactctgaagtactggaagcggtgaaagtggttaaaccgggtaaaacgctggatctgggctgtggcaatggtcgtaacagtctttacctggcagccaatggttatgatgttgacgcatgggataaaaatgccatgagtatcgccaacgtcgagcgcattaaatccattgaaaatctggataatttacacacccgagtcgttgatctgaataacctcacatttgatagacagtacgattttattcttagcactgtggtgctgatgttccttgaggctaaaaccatccccgggttgattgccaatatgcaacgttgcactaaacctggtggttacaacctgattgtggcggcgatggataccgctgattatccatgtaccgtcggcttcccgtttgccttcaaagagggagaattacgtcgatattacgaaggctgggagagggtgaaatacaatgaagacgtcggcgagctgcaccgcaccgacgccaacggtaatcgtattaaactgcgtttcgccacgatgctggcacgtaaaaaatgacccggtaagcacaaaacgcgtgaaaattccccacgctgagatgatttactgttcttcttttcggtaagcatattttttatcgaagggatgtgaaattaatcacagtagtcgaagtttttagcagcttaacttactgaaatttaagtactgatgattgacttagcccctttttcggcattgactatgtcgtctgaaaaggggctgaaaaatttattttcaccaacactttttttgccacaacacgaagcggcgctttttgctataacttagaaagtaatataatcatctcaggaaactattcatgcgtaccacaagttttgcgaaagttgcagctttatgcggcttattggctctgtctggttgtgcatctaaaatcacccagccagataaatattctggttttttaaacaattactctgatttaaaagaaacaaccagcgctacaggtaaacctgttttacgttgggtagacccgagttttgatcaaagcaaatatgacagcatcgtctggaacccaatcacttattatccggtaccgaaaccgagcacccaggtagggcagaaagttctggataaaattttgaactataccaacaccgaaatgaaagaagcgatagcgcagcgtaaaccactggttaccaccgctgggccgcgtagtctgattttccgtggggccattaccggtgtagataccagcaaagaagggctgcaattctatgaagtggttcctgttgcattagtggttgcggggacgcaaatggctacaggccaccgtaccatggatactcgcctctattttgaaggtgagctgattgatgcagcgactaataaaccggttatcaaagtcgttcgtcagggcgaaggtaaagacctgaataacgaaagtacgccaatggctttcgaaaatattaaacaagttattgatgacatggcgaccgatgccaccatgtttgacgttaacaaaaagtaattccagacgcgccatcgttagatggcgctttttatccggtgcgccgtaaaaccccatccttcagggcggggatataaggcgcggttttccacctgaccaggtgtttgctgttgttcaatgtattggcggatgacggatattggcgcacctccgcagctactggcaaaatagccaggactccacaaaacgcctttgtagtaatacctgaatgcaatatctggtcgatctcgtcgcagtcacctacccgatacgcctttgaggctgtttaccagactggatatcgccagtttgggaggatagttaattaacaaatggacgtgatctggttcgccatccatttcaaccagttcagcttcaaaatcagcacatacatttgaaaagtaagtgcgtagtttttctgtcgcgtcatggtcaaaaatctggcgtcggtatctggtgacaaagagcaggtgaacatgcatcaggaaaacacaatgccttccacgccggatatcggtttcttttttcacagaccaaagtatcatttgacctgtgaaacgattacaggcatttaaattccagttaagacccggtggtcaacaggagtgtgaaatgaggcgcttcgcaggcgcatgtcgtttcgttttcaatcgtgctctggcacgtcagaatgagaatcatgaggccggtaataaatacatcccttacgggaaaatggcttcctggctggttgagtggaaaaatgccactgaaacgcaatggcttaaagattctcccagtcagccattgcaacagagtctgaaagaccttgagcgggcttacaaaaacttcttccggaagcgggctgcttttccccgattcaaaaagcggggacagaatgatgcattccgctacccgcagggcgttaagctcgatcaggaaaacagccgtatttttctgccgaaactgggctggatgcgctaccggaacagccgtcaggtcacgggtgttgtgaaaaatgtcactgtcagccagtcctgcggtaagtggtacatcagtattcagacagaaagtgaagtaagtactccggttcaccctagtgcaagtatggtcgggctggatgctggcgtggctaaactcgccacgctgagtgatggcacagtctttgagcctgtaaacagttttcagaaaaaccagaagaagctggcgagacttcagcgacagttaagccgcaaggtcaaattcagcaacaactggcaaaagcagaaacgcaaaatacagcgactgcattcctgtatcgcaaatatccgcagggactaccttcacaaagtcacaacggccgtcagcaaaaaccacgcaatgatagtcattgaggatttgaaggtcagcaacatgagtaagagtgcagcgggtacggtcagccagccggggcgcaatgtccgggcaaaaagtggtttaaaccgtagcatactggatcagggctggtatgaaatgcgccgccagcttgcgtataagcagctctggcgtggcggtcaggtgcttgctgttccgccagcgtatacaagccagcgttgcgcgtactgtggtcatacagcgaaagagaaccgcctgagtcaaagtaaattcagatgccaggtatgtggatatacagcgaacgccgatgtaaatggcgctcgcaacattttagcggcggggcacgccgttcttgcctgtggagagatggtgcagagtggccgcccgttgaagcaggaacccaccgaaatgattcaggcgacagcctgaacgtagcagggatccacgtccttcagggcgtggaggatgtcaatatcggtttctgtcagcgattaaattcaacaccacgtaacaaacgcctccggcaattaatccccaaaacgcagaaccaatcccgaccagcgtcaatccacttgccgttaccagaaatgccaccaccgccgcgtctcgctcacgctcattatgcagcgcctgatacaaactgccgccgatggtacttaacagcgccagacctgccagcatctggatccaacttacgggcagggcagccatcatcccggtaatggcactaccaaacagacctgcgagcaaatagaaaatgcctgcaacggcagcggccagccaacgttgatctttatccggatgcgcttccgggctttggcaaatagccgcggtgattgccgcaataccgacggaataaacgccgaaaggggaaaaaaccagtgccagcaatccagtaaatacaattaatgggctaacaggagcgctatatccagctgctttcattgctgcgatacccggtgcgttttggcttgccatcgtcaccagaaaaagggggagtgcaacgctcaggctgtgagcaaagctaaaatcaggggtaatataagtggggagaacgggtttaaagacaacatcagttgtgacaacgtcaccttgcgcgatgacgatcacgatcccaataatcatcgcggcaattaccgcatagcgcggcgcaacggccttggttgccagccataccagcaacatacttccacacaacgtaaattgaccgtccagactggcaaacgcctgtaaaccaaagcgtaataaaatcccggcaagcattgccgccgcaaggctgtgcggaataatgcgcatcagacgagcaaagagtcccgttatgccgcagaggactattagcgcgttggtgacaataaaaacgccgatggcttcgttaagtgttagtccctgcaatccggtgaccaacaaagccgcgccaggcgtactccatgcggtgagaacaggtacgcgataccataatgtcagagtcagcgtactgacgcccattgccagccccagcgccgtcatccagccagagatttgtgcagtggtggctccggcgacaatcgctgcttgccagattattgccgcactactggcgtagccaattaataccgccagaaaccccgccagtagcgtgggtggaggaatagaaaacagacgcatagtcacctcgtgcgttatagcgtacaggcaccgtagcatttgtccgttataacgcacaagtgataaacttccgttttgccggaggagtcgcatggaaaatctcgctcgctttttatccaccacacttaaacaactacgccagcagcgcggctggagtcttagccgactggcagaagcgacgggcgtttctaaagcaatgttagggcagattgagcgtaatgagtccagtccgacggtcgcgacattatggaaaattgccaccgggttgaacgtaccatttagtacatttatttctccgccgcagtccgctacgcctagtgtttatgatccacaacagcaggcgatggtgatcactagcctgtttccttatgatccacaactctgctttgaacacttcagcattcagatggcatctggtgcaataagcgaaagcacgccccatgagaagggggtaatcgaacatgtcgtcgtcattgatggacaacttgatctgtgcgttgatggggaatggcagacccttaattgtggggaaggcgttcgatttgctgcagacgtcacgcatatctatcgtaatggtggggagcaaaccgtacattttcattccctcatccattacccgcgcagttaagcgggaaaactatttcgcaacgtcgcgcttgtggctaaaatagccgccatttttcagctactggataagaatgtgaccgtatcttctcatcgacttgaactgttaagcccggcacgcgatgccgccattgcccgcgaagctattttgcacggtgccgatgctgtttatatcggcggccctggttttggtgcccgtcataatgccagtaatagcttgaaagatattgccgagctggtgccgtttgcccatcgttatggtgcaaaaattttcgtcacgcttaacaccattttgcatgatgatgagctggaacccgcgcaacggctgattactgacctctaccagaccggtgtcgatgcgctgattgttcaggatatggggattctggaacttgatattccgccgattgaactgcacgccagtacgcagtgcgacattcgtacagttgaaaaagcgaagttcctctctgatgttggcttcacgcagattgtgctggcgcgagagctgaatcttgatcagatccgcgcgattcaccaggctacggacgcgaccattgaattctttattcatggggcactgtgcgtggcctatagcggtcagtgctacatttctcatgcgcaaacagggcgtagcgccaaccgtggcgattgcagccaggcgtgccgtttgccatacacattgaaagacgatcaggggcgggtggtttcctatgaaaaacatctgctgagcatgaaagataacgatcagactgccaacctcggcgcgctgattgatgctggtgtacgctccttcaagattgaagggcgttacaaagatatgagctacgtgaagaatatcaccgcccattatcgccagatgcttgatgccattattgaagaacgtggcgatctggcgcgcgctagtagtggtcgtactgaacatttctttgttccaagcacggaaaagactttccaccgtggtagcacagattattttgtgaatgcccgtaaaggcgatattggcgcgttcgatagcccgaaatttatcggcctgccggtaggcgaagtagtgaaagtggcgaaagatcatctcgatgttgccgttaccgagccactggcaaatggcgatggcctgaacgtgttgattaaacgtgaagtcgtcggttttcgtgccaatacggtcgagaaaaccggagaaaatcagtaccgcgtctggcccaatgaaatgccagcagatttgcacaaaattcgtccacatcacccactaaaccgtaatcttgatcataactggcagcaggcactgacaaaaacctccagcgaacgtcgggtggcggtagacattgaactgggcggctggcaggaacaactgattctgaccctcaccagtgaagagggtgtcagcatcacgcatacgctggacgggcagttcgacgaagccaataacgccgaaaaagcaatgaacaatctgaaggatggtctggcaaaactggggcaaaccctctattacgcccgcgatgtgcaaattaatttgccgggggcgctgtttgtaccaaacagtctgttaaaccagttccgccgtgaagctgctgacatgctggatgctgcgcgtcttgccagttaccagcgcggcagccgtaaaccggttgctgatcctgcgccggtttatccgcaaacgcatctgagtttcctcgcgaacgtatacaaccagaaagcgcgtgaattttatcatcgctatggtgtgcagctgattgacgcggcgtatgaagcacatgaagagaagggcgaagtcccggtgatgatcaccaagcattgtctgcgctttgcctttaatctgtgcccgaaacaggcgaaaggcaatatcaaaagctggaaggcgacgccaatgcaactggttaacggcgatgaagtattaacgctaaagtttgattgccgcccatgcgagatgcacgtcattggcaaaatcaaaaatcacatactgaaaatgccgttaccgggaagcgtagtggcatccgtaagtccggatgagctgctgaaaacattgccgaagcgaaaagggtaaaacgccagttttctggttactcacaacttattgaatctgcatgatattgcctgccgggtaaggcgttacgccgcatccggcatcaaatgactcaacgttgtcccgcttctggtttgcggcttttttgccagtaaaaatgctcgcgcaaaccttccgcgctctcttccgccacagcacgcaattcatcgctgtccgcttcatgacgcagctgatgatccacattctttacccacacaaattcatgtcctttgtgccctgccatgagttgtccactaaacagagcacacgttaataagacaacgcttaacgccttcgtaaacatcctgccacctttttcttaccttttgccgctatgatgccgatcgtttcttgaggttattattcagttttgcaaattagcgcaaagaaattctggaatcttccttcctgattttgcattgcattctgccgttgcggcgatttagtgctattttcgagcaaattacacacggaggtaaacactaatgtttactttgttgatatactcagcggcagggaggcgatgtgaaacaaagcgagttcagacgttggctcgaatctcagggcgtcgatgtagcgaatggcagcaaccatttgaaactcaggtttcatgggaggcgcagtgtcatgccgcgtcacccctgcgatgagattaaagaaccattgcgtaaagcaatcctgaaacaactcggtttgagttaatcgccaattaaaaaggttaatgacatgcgagagacagtcgaaattatgcgttatcccgtcactcttacacccgcgccggaaggcggttatatggtttcttttgtggatatccctgaagcgttgacccagggcgaaactgtcgctgaagcgatggaagcggcaaaagatgctttactgaccgcatttgatttttattttgaagataacgagcttatccctttacctagcccattaaatagtcacgatcactttattgaagtacctttgagcgtcgcctctaaggtattgctgttaaatgcttttttacagagtgaaatcactcagcaagagttagccaggcgaattggcaaacctaaacaggagattactcgcctatttaacttgcatcatgcgacaaaaatcgacgccgtccagctcgcggcaaaggcgcttggcaaagagttaagcctggtgatggtttaattacagttaacgaaaagttgtcatttttaacaactgatatagactgccgaatcatctgcacataattacgattcgataatgaaaaaataccagcagcttgcagaacaattacgcgagcagattgcgagcggtatctggcaacccggcgatcgtttgcctagcttgcgtgaccaggtggcgcttagtggcatgagctttatgactgtcagccatgcctatcagttgctcgaaagtcagggatatattatcgcacgaccgcagagcggttattacgttgcgccacaggcaataaaaatgccgaaagcgccagtcattccagtcactcgagatgaagcagtcgatatcaacacttatatttttgatatgttgcaggccagtcgcgatccgagcgtcgttccgtttgccagcgcctttcccgacccgcgacttttccccctccaacaactaaaccgcagcctggcgcaggtaagcaaaaccgccacagcgatgagcgtgattgaaaacttaccgccaggaaacgcagaactgcgtcaggctattgctcgtcgctatgccttacagggcatcaccatttctcctgatgaaattgtcattactgccggggcgttagaggcattaaacctcagtttgcaagcggtaactgaaccgggcgattgggtgatagtagagaatccttgtttctacggtgcgttgcaggcgctggagcggctacggctgaaggcgttaagcgtggcgacggatgttaaagaagggatagatcttcaggcgctggaactggcgttgcaggagtatccggtgaaagcgtgctggctgatgactaatagccagaatccactcggatttaccttaacgccgcaaaaaaaagcacaactggtggcgttgctcaatcagtacaacgtaacgctgattgaagatgacgtttacagcgaactttattttggacgggaaaaaccgctgcctgcgaaagcgtgggatcgccacgatggcgttttgcattgctctagctttagcaaatgtctggtgcctggttttcgtattggttgggtcgccgccggaaaacatgcacgtaaaattcaacgcttgcagttgatgagtacgctttccaccagcagtccgatgcaacttgcgctggtggattacctttccacgcgccgatacgacgcccatcttcgtcgcctgcgtcgccagcttgcggaacgtaaacaacgtgcctggcaggcactgctgcgttatctgcctgcggaagtgaaaattcatcataatgacagtggttactttctctggttggagctccccgagccgttagatgccggcgaattaagcctggcggcactgacgcatcatatcagtattgcgccgggtaaaatgttttctaccggtgaaaactggagtcgttttttccgttttaataccgcgtggcagtggggagagcgtgaagaacaggcggtaaaacaattaggcaaacttattcaagaacggctgtaatagcgtttaatttaattcctcttagattgggtaatatgaatttcgaatagcagtcatatttcctaactccttgactatactccagaagataaccttacagacggcataatgcgcggtagctcacaacctgaataaattttctcaggggcgaaggtgtgcctgcaagccgccgtctatggttaaacaaggagatatttttacggcacggcggctgaacaattaattacgacaggagtaagaccttatgagcaagacatttgcccgcagcagcctgtgtgcgctcagcatgacaataatgaccgctcacgccgccgaaccgcctaccaatttagataaaccggaagggcgactggatattatcgcctggccgggatacatcgaacgcggacaaactgataaacaatacgactgggtaacgcagttcgaaaaagagacaggctgcgcggtgaatgtgaaaaccgccgcgacttccgatgaaatggtcagtctgatgaccaaagggggttacgatctggttacggcatccggcgatgccagcctgcgtttgattatgggtaaacgcgtgcagccgattaataccgcattgattcccaactggaaaacgctcgatccgcgcgtggttaaaggcgactggtttaatgttggcggcaaagtttacggcacaccttaccaatgggggccgaacctgctgatgtacaacactaaaaccttcccgacgccgccggatagctggcaagtggtttttgttgagcaaaatctgccggacggcaagagcaataaaggccgcgttcaggcttatgatggccctatctatattgcggacgctgcgttgttcgttaaagccactcagccgcagttgggcatcagcgatccgtatcaactcaccgaagaacagtaccaggcggtgctgaaagtgctgcgcgctcaacacagtttgatccatcgctactggcatgacactaccgtgcaaatgagcgatttcaaaaacgagggtgtggttgcttccagtgcctggccctatcaggccaacgccctgaaagccgaaggccagcctgttgctaccgttttcccgaaggagggtgttaccggttgggctgataccaccatgctgcatagcgaagcgaaacatccggtttgcgcctacaaatggatgaactggagtttaacgccaaaagtgcagggcgatgtggcggcctggtttggcagcttaccggtagtgccggaagggtgtaaagccagtccgttattaggcgaaaaaggttgtgaaaccaacggttttaactatttcgacaaaatcgccttctggaaaacgcctatagcagaagggggcaagtttgttccctacagtcgctggacgcaggattacattgccattatgggcggtcgctaacttcgctggggtgctttatgacgtacgcagtggagtttgacaacgtcagccggttgtacggtgacgtgcgcgcagtagatggcgtcagtattgcgataaaagatggtgagttcttctctatgctggggccgtccggctccggcaaaaccacctgcctgcgcctgattgctggcttcgaacagctttccggcggggctatctctatctttggtaaacccgccagcaatctgccaccgtgggagcgggacgtgaatactgtctttcaggactacgcgctatttccgcatatgagcattcttgacaatgtcgcctatgggctgatggtcaaaggcgtgaataaaaagcagcggcacgcaatggcgcaagaggcgctggagaaagtggcgttggggtttgtacatcaacgtaaaccgagtcaactttctggtggtcagcgccagcgggttgctatcgccagagcattggtgaatgaaccgcgcgtattgctgttggatgaaccgctcggcgcactggatctcaaattgcgtgagcagatgcagctggaactgaaaaaactgcaacagtctctcggtatcacttttatcttcgttacccacgatcagggcgaagcgttaagcatgtccgatcgtgtggcggttttcaataatggacgcattgagcaggtcgattccccgcgcgatctctatatgcgcccgcgcacgccgtttgttgccgggttcgttggtacaagcaatgtttttgatggactgatggcagagaaactttgtggcatgacgggaagcttcgccctgcgaccggaacatatccgcctcaacacccctggtgaactgcaggccaatggcacgatccaggcggtgcaatatcagggcgcggcaactcgttttgaactgaaattgaacggcggtgaaaaactgcttgtgagtcaggccaatatgacaggcgaagaactgcctgccacgctcacgcccggacaacaggtgatggtttcctggagccgtgatgtgatggtgccgctggttgaggagaggtgaatggcgatgaatgtattgcaaagtcctagtcgtccaggtctgggtaaggtgtccggtttcttctggcataatccggggctggggctgtttttactgctgcttggcccgctaatgtggtttggcattgtctatttcggcagcctgctgacactgttatggcagggattttatacttttgacgatttcaccatgagcgtaacgccggaactgacgctggcgaatatccgtgcgctgtttaatccggcgaattacgacatcattctccgcacgctgactatggctgtggcagtcactatcgccagcgccattctggcttttccaatggcgtggtatatggcgcgctataccagcgggaaaatgaaagcgtttttttatattgcggtaatgttgccgatgtgggcgagctacattgttaaagcctatgcctggacgttattgctggcaaaagatggcgtggctcagtggtttttacaacatcttgggctggaaccactgctgactgcgttccttacattacctgcggtgggcggaaatacgctgagtacttccgggctggggcgctttctggtgtttctctatatctggttgccgttcatgatcctgcccgttcaggcggcgcttgagcgtttgccgccgagtttgttgcaggcgagcgctgatctcggcgcacgtccacgacaaacctttcgctatgtggtgctgccgctggcaatcccgggtattgccgctggctctatctttaccttcagtctcacactgggcgattttatcgtcccgcagctggttggtcctccaggatattttatcggcaatatggtttattcccagcagggggcgattggcaatatgccgatggcggcggcattcaccctggtgccgattattctcatcgcactgtacctggcgttcgtgaaacgtctgggagcgttcgatgcactctgaacgcgcaccgtttttcctcaaactggcggcctggggcggcgttgttttcctacattttcccatcctgataatcgccgcctatgcgtttaacactgaagatgcggcgtttagttttccaccgcagggcctgacgctgcgctggtttagcgtggcagcacagcgtagtgatattcttgatgccgtgacactgagtcttaaagtggcggcgctggcgacattaattgcgctggtgttagggacgctggcagctgccgcgctgtggcgacgagactttttcggcaaaaacgccattagcctgttactgctgctgcccattgcgctgccgggcattgtcactggtctggcgttattaaccgcctttaaaaccatcaatctggagccgggatttttcaccatcgtggtcggtcatgcgactttttgtgtagttgtggtgtttaacaatgtcatcgcccgttttcgccgcacctcctggagtctggttgaggcgagtatggatcttggggccaatggctggcaaaccttccgctacgtagtgttgccgaatctcagtagcgcgttactggcaggaggaatgctggcgtttgccttgagcttcgatgaaatcatcgttacgacctttacggcaggtcatgaacgaacgttaccgttgtggttgctcaatcagcttgggcgaccgcgtgatgtaccggtaactaacgtggtggcactgctggttatgttggtaacaaccttgccgatcctgggggcctggtggctaacccgcgaaggcgacaatggtcaataaccactgatacaggaatatgctatgcaacataagttactgattaacggagaactggttagcggcgaaggggaaaaacagcctgtctataatccggcaacgggggacgttttactggaaattgccgaggcatccgcagagcaggtcgatgctgctgtgcgcgcggcagatgcagcatttgccgaatgggggcaaaccacgccgaaagtgcgtgcggaatgtctgctgaaactggctgatgttatcgaagaaaatggtcaggtttttgccgaactggagtcccgtaattgtggcaaaccgctgcatagtgcgttcaatgatgaaatcccggcgattgtcgatgtttttcgctttttcgcgggtgcggcgcgctgtctgaatggtctggcggcaggtgaatatcttgaaggtcatactagcatgatccgtcgcgatccgttgggggtcgtggcttctatcgcaccgtggaattatccgctgatgatggccgcgtggaaacttgctccggcgctggcggcagggaactgcgtagtgcttaaaccaagtgaaattaccccgctgaccgcgttgaagttggcagagctggcgaaagatatcttcccggcaggcgtgattaacatactgtttggcagaggcaaaacggtgggtgatccgctgaccggtcatcccaaagtgcggatggtgagcctgacgggctctatcgccaccggcgagcacatcatcagccataccgcgagctccattaagcgtactcatatggaacttggtggcaaagcgccagtgattgtttttgatgatgcggatattgaagcagtggtcgaaggtgtacgtacatttggctattacaatgctggacaggattgtactgcggcttgtcggatctacgcgcaaaaaggcatttacgatacgctggtggaaaaactgggtgctgcggtggcaacgttaaaatctggtgcgccagatgacgagtctacggagcttggacctttaagcagcctggcgcatctcgaacgcgtcggcaaggcagtagaagaggcgaaagcgacagggcacatcaaagtgatcactggcggtgaaaagcgcaagggtaatggctattactatgcgccgacgctgctggctggcgcattacaggacgatgccatcgtgcaaaaagaggtatttggtccagtagtgagtgttacgcccttcgacaacgaagaacaggtggtgaactgggcgaatgacagccagtacggacttgcatctagcgtatggacgaaagatgtgggcagggcgcatcgcgtcagcgcacggctgcaatatggttgtacctgggtcaatacccatttcatgctggtaagtgaaatgccgcacggtgggcagaaactttctggttacggcaaggatatgagtctttatgggctggaggattacaccgtcgtccgccacgtcatggttaaacattaaggataatattgcagatcgtaagagtatgagatgatcttgcgtactgtcagagcactgatttctctgacagtacgtgctgcgtgcaaaatcactacatcaaataaaccagccaaatctcatagagataagagtaaacaaaccaacagcagcaaagaaatttatcagtactacagttctactggaaacattcatttttgccaccttttatcattgcccctatgtgtatagtacgggttaagaaaatccgcaataatactcattctgaagatggataagggcaagttgctgtttgatgattttttctcaaactggtgaaaaaacttgatgcacgtcaaaaaatgacgcatatttgcgcgcgttttattcatctggctggacgcccgtacatgtctctctatcaacacatgcttgttttttatgcggttatggcagcaatcgcatttcttatcacctggtttctttctcacgataagaaacgcatccgtttcttaagcgcctttctggtgggggcaacatggccgatgagtttcccggtggcgctgttgtttagtctgttttaaatcttactcactggcttgacggcaccacgcagacttatatcatttggatgaatcgataaatttcacaagtggctaaggagaaagtatgagccatctggatgaagtcatcgcgcgcgtggatgccgcgattgaagagagcgtcattgcccatatgaacgaattattaatcgccctgagcgatgacgcggagttaagtcgggaagatcgctacacccagcagcaacgtctgcgcacagcgatcgcccatcacggtcgcaagcataaagaagatatggaagcgcgccacgaacagttaaccaaaggcggcaccatcctctgattaaaaactgcgtctggctaccaaccaggcgccaaccacaagtaaaattgcgccacaaattgggccgaacaacgcccgtagtggtacgccatgactgcggaagatatccagcatcagaccgccaatcagctgactggcgaccagtacagcaatagttgtcgccgctcccacattctgatatccgctgatactggcgaagacaaaaaagcttcccagcaagccaggtataagtgtccaccagcgcacgctggacaccagttcgccaaaccccgccatgccttgtttaaaccataaaatagaaacaaagagcacaatccccaccagactgttcagcaacatggcgatgagaatggtagaggaggtctgggtgatgcgcaccatcagcgtgttctggacaaccagaccaattccggcggcaatcaaaaaagcaagggtgaggctctgattcatccaatcgcgtccggttcagtgcgctcgtcgagttgcaactgcataaatgtcagatccagccaacgaccaaatttagtgcctacctgcggcatttgcgcggtgacgacaaatcccaggctctggtggagatgcaggctggcctgattttggctttcgatcccggcgaccatgacatgcttcccgcaatcccgcgcttcatcaatcaatcggcttaacaatttacgccccagacctttgccctgatgatcgggatggacataaacgctatgttccacggtatggcgaaaaccatcgaaactacgccagtcgccaaagctggcatatcccgtcactacgccgttttcctcgctcaccagcactggataacctgctaaagtccgcgcttcaaaccaggcaatgcggttatcagcatccaccgtttggtcattccagatagccgccgtatacaacacggcgtggttataaatttccgcaatggcagcacagtcggctttgcgggcaaaacggatggacatgtctggcctcaataaaataatgatgatgatgttatcaatactatcgaaaacagcccgaagcaacggattcctcgatgaaattattgcgtgttgcagaggggatgtgacggctgcaaacaaaaccaatcccgtgagcctgctactattgatggattcatgccaaaagcacaggagagcattatggggcaacaaaagcagcgtaatcgacgttgggttctggccagccgtccacatggcgcacctgttccggagaatttccgtcttgaagaagatgatgtcgccacaccgggtgaaggacaggtgttactgcgcacagtttatttgtccctggacccgtatatgcgtggacgtatgagcgatgagccatcttatagtccgcctgttgatattggcggcgtgatggtcggcggtacggtgagccgtgtcgtggagagcaatcatcctgattatcagtctggcgactgggtgctgggctacagtggatggcaagactatgacatatccagtggtgatgatctggtgaaacttggcgatcatccgcaaaatccaagctggagcctgggtgtgctagggatgccaggctttaccgcttatatgggcctactggatatcggtcagcctaaagagggcgaaacgttggtggtagctgcggcgacaggaccagtgggggcgacggtggggcaaatcggcaaacttaaaggttgcagagtggtgggggtagccggtggcgcggaaaaatgccgccatgctaccgaggtgttaggcttcgatgtttgtcttgatcaccacgcggatgattttgccgaacaactggcgaaagcgtgcccaaaaggtattgatatctattatgaaaacgtgggcggtaaggtattcgatgcggtgctaccgttacttaatacatctgcgcgcattcccgtctgcggattagtgagcagctataacgctacagagctaccacccggtccggatcgtttacctctgttgatggctacagtgctgaaaaaacgtattcgcttgcaaggttttattatcgctcaggattatggtcaccgcatccatgagtttcagagggagatggggcaatgggtgaaagaggataaaatccactaccgcgaagaaattactgacggtttagagaatgcgccacagacgtttatcggcctgctgaagggtaaaaacttcggcaaagtggtgatccgcgtggcgggtgatgattaaagtttcaacggcggcgtaagccgccataaaaatccaggcaaaaagcttattttcagctttaattaactaaccacatcattgttctgctgctaataacaacaaaggtgagtggtttatgattattcactttaatacaccaggtgaattccttctgccatgcaggcagggttggacagaaaacacgcgaaggaattaaaatgcctggaacgggaaaaatgaaacatgtcagtttgactctgcaggttgagaacgacctgaaacatcagcttagtattggcgcattaaaacctggcgcacgcctgattactaaaaatctggcggagcaattaggtatgagtattacacctgtgcgtgaagcattattacgtctggttagcgtgaatgcgctttctgtcgcacctgcacaagcatttacagttccggaagtggggaaacgtcaattagacgaaatcaatcggatccgctacgaactggaattaatggcagttgctctggctgttgaaaacctcaccccgcaagaccttgcggaactccaggaattgctcgagaaattacagcaggcgcaagaaaagggcgacatggaacaaatcattaatgtaaacaggctatttcgcttagcgatttatcatcgcagtaatatgcccatcctgtgtgagatgattgagcaactgtgggtcaggatggggcctggtttacattatctctatgaagcgattaatccagcggaattacgggagcatatagaaaactatcatctgttactcgctgcgttaaaagcaaaagacaaagagggatgcagacattgtcttgctgaaattatgcaacaaaatattgctattttataccagcaatacaatcgttaaagtaaatgcccggcaaataccgggcatcaaggtaattactcaaatctccacgcaatattcatgccgacaccataatttcgtccggggctaggttcgtaatatcgcccgttactctcattgacaatgacagaaccaacgtattctttatcgaataaattatcgacacgaccaaataaatccacagttaaattgtggtaattgtatttatacccggtgaataagccgacgagagtataagacggcgcttttgccgtattttcatcatctgccataatatcgcccatataacgcgcttccgtgcctgcataccaaccatcttccggtacataacctatgctcgcaaagcccatattacgggcgatccctggcatccgattaccgttacaatcctgttcattgcaaacattgctgcgataggtcgcatcaagccaggtccaggacgcgtttacgcgaaaatctcctgcgaaacgttgatcccatgccagttcagcgccttgacgacgggtctttccggcatttttgtaagtcgtacgcccaccgctactgctatcgacaacaatttcatcatcagtgtcggtctgaaacaatgcgagactaagcagcccatcaccaatacgcgttttactgccgatctcaattgtatcgttggtggatggttttaaacctaagttcataccgctttgcccatcagcacgataagacagctcattaatcgtcggcgtttcaaaacctcgcccggctgccagatagatattccaggcatcggtcattgcatattttaagctaccggcaggtagccatttatgataactggcatcaccgctgtcatcgccgttacccggagtaacgtaatggtcgttggaatcaaaccacacggagctgtagcgcacgccagcatccaggctcagtttttcgctcagctgccactgcgtctgtaaatagggatcgatgttccacatcagattgcgttcgtcgcgacgcaactcacctttttgcccgtactccggcatgccgctattcaggcggaagttattgtagcccttgcggttttcactcatgttttcgtagttcaggccggtagtgaacgtgaccggaacgcccagttcaccacggtgtgtccagcggctgtctattccctggtaatggcgttgcagggtaatcacgccgcccgcatgactcgggttaagttgtggtgccatgggtatactctggtactgggtcgtttctcgctctccggcatacatcatcacactcatatcatcccggctactcaggctacgctcatagcgcaacccagcctgagtttgcttgatggtttttcgcgtgtcgtactgttctgcacgaggcgcttgttgtggattagccttccattctgctttggttagcccacctgggtcatctgctttgatatccacactattgaaaatcagacttaatttgctggcttcatcaatgcgtacgcccagtttggcattggctaaatttttctgtgcgccactatggtcacgatagccgtgggtcgtaaaacgcgtggtactgacggtgtaatcgacatcgccaggctgtgtgccgtctcccgttgcgcccgttgctttcagcccatagcgccagctgccaaaactgccgtagtaactactggcttcaatggttggtggctgttgtccggtctgggtggtgacattcattaccccaccagacgcgttgccatacagggcagagaaggggccacgcagcacttccacattttgcacactgcttaaatcgatgttggatgtttgcccttgcccgtcgggcatggtggcgggaataccgtccacatacaggcgaataccgcgaataccgtaagtggagcgggagccaaatccgcgaatgctcagctgtaaatcttgcgcatagttctgccggttttgtacctgcaaaccaggcacgccggtcagactttcggacaagttaatgcgcggtgttgccaggcgcatctcctcgccatccaccacgcttactgctgctggggtatccagttcactaaccacctgcggtgcggcactgacaatcatagtctgttcatcagcggcaaaaacaacgggggaaaggacaagcagtgcgggcaaaacggtctgtcggacggaaaaaatcttcatgaaaaaagccaggttaagaatgggaaaacgccgtcatggtaatgaaattgtaaatttatggaaaatgaaacggcacaatacgttaagtaattgagaaaattgtagtcgtaacggcaagaaatgctccacatttgagaaaataatgattaccattcccatttataacaagagcgtaacgatgattacgcttagcgaagcattgtgaagcagcaaaaatatcggttcatcaaagggagtcgtcatgcatttacgtcatctgtttagtagccgcctgcgtggtagtttactgttaggtagtttgcttgttgttagtagtttcagtacgcaggccgcagaagaaatgctgcgtaaagcggtaggtaaaggtgcctacgaaatggcttatagccagcaagaaaacgcgctgtggctcgccactagccaaagccgcaaactggataaaggtggcgtggtttatcgtcttgatccggtcactctggaagtgacgcaggcgatccataacgatctcaagccgtttggtgccaccatcaataacacgactcagacgttgtggtttggtaacaccgtaaacagcgcggtcacggcgatagatgccaaaacgggcgaagtgaaaggccgtctggtgctggatgatcgtaagcgcacggaagaggtgcgcccgctgcaaccgcgtgagctggtagctgacgatgccacgaacaccgtttacatcagtggtattggtaaagagagcgtgatttgggtcgttgatggcgggaatatcaaactgaaaaccgccatccagaacaccggtaaaatgagtaccggtctggcgctggatagcgaaggcaaacgtctttacaccactaacgctgacggcgaattgattaccatcgacaccgccgacaataaaatcctcagccgtaaaaagctgctggatgacggcaaagagcacttctttatcaacattagccttgataccgccaggcagcgtgcatttatcaccgattctaaagccgcagaagtgttagtggtcgatacccgtaatggcaatattctggcgaaggttgcggcaccggaaagtctggctgtgctgtttaaccccgcgcgtaatgaagcctacgtaacgcatcgtcaggcaggtaaagtcagtgtgattgacgcgaaaagctataaagtggtgaaaacgttcgatacgccgactcatccaaacagcctggcgctgtctgccgatggcaaaacgctgtatgtcagtgtgaaacaaaaatccactaaacagcaggaagctacccagccagacgatgtgattcgtattgcgctgtaatagatatggcgagggtgaaaacggtgagacttgcctgccttttatcacggcgtatccggcactttcgtcagtaatctgaatttgcccggcacgtagccgggcaattttgcaattaactcgccgtttcaggcttaaacacaatttcctgtttttcttcatcttcctcgacgactggcgcagtgctgtgaatttcagcaacgcgtttgcgcacaccaaaccagcctataaccagcaaaataccgataatcggcagcgccgcgatagtataagtcccgttcgggtaatcgaacgccatcagcacaaggacactcagtaaaaacagtaatgtcagccaggaagtgaagggcgcgccaggcagtttaaaactgacatccgctgctttgccttctttaatcgctttacgcaggcgcatctggcacacgatgataaacgcccaactagcgatgattcccaggctcgcgaagttcaacacaatctcaaatacgcggctcggcaccagatagttgaggaatacgccgacgacatacacaactagtgtcgccagaatcccggcatacggcacatgctgacgactcattttcgccataaaactcggtgcggaaccgcccatcgccatactgcgcagaatacgtccggtgcagtacagaccactattcaggctggagagggcagcggtcagcaccacaatgttcataatgctgccgatatatggcacacccagtttagagaaaaacgtcacgaacggactttgccccgcctgatacgcgctccacggcaataacataaccagcaacaccacggagccgacgtaaaacaggccaatacgccaaatcacactgttaatggctttaggcaccatggtctgcggatctttacattctccggcagctgtacccaccatttcaatggaggcaaaagcaaacactacgccctgaatcaacaccagcgcaggcagcaaaccgtgggggaagaagccgccattatcggtgattaaatgaaagccagtggtgttgccatccagcggctgaccactaccgaggaacactgtacccacgaccaaaaaggtcacaatggcgagcactttaataagcgcaaaccagaactccatctccgcaaaccatttcacaccgatcatattcatggtgccaacgatggtaagtgcagcgagcgcaaagacccactgcggcacgccgccaaacgcaccccagtaatgcatatacagagcgacggcggtaatatcaacaatccccgtcatcgcccagttgatgaagtacatccagccagcaacataagcggctttctcacccaaaaactcacgggcataagaaacaaaactgccactggaagggcggtgtagcaccagctcacccaatgcacgcagaataaaaaagctaaacaagccacaaattaaataaaccagtgccagtgcgggccccgccatttgcagtcgggctcctgcacctaaaaacaagccggtgccaatcgcgccgccaatggcgatcatctgcacctggcgattgcccatcgctttgtgatacccctcttcgtgggcattaagccagcggcgtttcgcggcgtgttgatcactagtgtcggtgtcgtgtttactcattgctctccctgattgctttaatgaaaaagtcatataagttgccatgaacaatgtttattcatcctggcgatgatagttatcaccattattctttatgggtataaaactatcggcgcagcatcctacccgttatcgataaacgatgcaaaacatccccttacaatcctgaaggggattaatacaactgacgaaaaaatgacaaatccttttgctggttaacctgtgtactgtcctacacttaatctttaaaagattgtgaggggcatatgattaaggtgtatggcgtacccggatggggctctacaatcagtgagctgatgctaacactggctgatattccttatcagttcgttgatgtcagtggttttgaccacgagggagctagtcgcgagttattgaaaaccctgaacccgttgtgtcaggttccgacactggcattggaaaatgacgagattatgacggagacagcggcgattgcattgatggttctcgatcgtcgcccggaccttgcgccaccggttgggcgcgccgaacgtcagctgtttcaacggctattggtctggctggttgctaatgtctatccaacattcactttcgccgattaccctgagcgttgggctcctgacgcacctgaacagttaaagaagaatgttattgaatatcgaaaaagcctttatatctggttgaatagccagctcactgctgaaccttatgcgtttggtgagcaactaacgctggtggactgttatctttgcactatgcgcacatgggggcctgggcatgaatggtttcaggataatgccacgaatatcagtgcgattgctgatgctgtatgtcagttaccgaaattacaagaagtattaaaaaggaatgaaattatttgagtgggataccagaagattatgttatttattattcagtaactttatccacaatgatgggcgtaattaattaaattcatggtatgttttttaatttatatcactctccttttcattcagcgtgtctatttcatttcctctgaaaagaaactaactattcacatcgtgcagatgtttcagttgttaagtcaggcattctataatctcaaaatgtttttaatgatggatatgctcggagttggagatgcaattaatattaatacaaataaaaatatccggcaggtatgctaaaaggataaatggcgttctctgtatttattcgcaattatctgtaggacaaatatggagagcttgatgagtcagagctaaaacagcaattgattaataaacatgttgatttattcaagaaaatggatgtattttaaatgttgattcttaatataacctaatcaatagattatcaagtgagagctacacattattggaggggcaggggaaaacaccattttgggaacaatgcatcaggtactcttaccactgaagcaagatcatccggcaccaggtggtggtgcagtgctttggaaatggtcccctcgggggagttgtcattattttctatgctatttgcttattatattcatcaggtgaatttaataaattcctaatttgaaatatccactattaagctagtgtttaacgacgttaagatggcaatgtgcagatcatgttatcagggtggggcggtagcgtatattccttatacaaaccatcattcatttcaatgattgttattgaattatttattgttgtgaataaaaagacattatgaatattggtttgactttgcatatcaggttttttattactcgctgtaatgtacgagcctgtcgtgaataacgtcgagaacccatccgttgcgtttgtgattattttgttgactaaacagacacccgtttctctgaagtaaaatcccagactaaatcatcacataaccatgacatttttctgatattccccggtaacgccagataacgatgccaaatttaccgttatgttcaatcaactccctggtccatgtcgatttatctaccacaatcgccacgcgtggaggttcaaactccaccggcattgaccaggctgcagccataatgttacgccgctgggattgctcatcgaaactggtgatcaagaccgttgggccatgatttaacagacggctggcatggtgtaattctatggggatgaatcggctcatggtatcgcctcgcgaagaaggtttttttaagcgtagtccgtaacgcaataagtaacgaaattaacgggattggcgatttgcgaacgtgatgcatgtccgcgatcgcacaaaatagccggtgcggcgtctattccaggttataagttgagaaaaccactaagggaaacgcctgatgacgcccattctgaatcactattttgcccgtattaactggagcggagctgctgcggtcaatattgatacgcttcgtgcattgcacctgaaacacaattgcaccattccgtttgaaaacctcgacgttttgctgccgagggaaatacagcttgataatcaaagcccggaagagaaactggtgatagcccgtcgtggcggttactgttttgagcagaatggcgtgtttgagcgggtgttacgcgagctggggtttaacgttcgcagcttgttagggcgcgtagtgttaagtaatccgccagcattaccgccgcgcacccatcgtttgctgttggtggaactggaagaggaaaaatggattgctgatgtcggtttcggtgggcagacgctaaccgcgccgattcgtttagtttccgatctcgtgcagaccacgccacacggagagtatcggttgttgcaggagggtgatgattgggtgttgcagtttaatcatcatcagcattggcagagcatgtaccgttttgatctctgcgagcagcaacaaagcgattatgtgatgggcaatttctggagcgcgcactggccgcagagccattttcgccatcatttgctgatgtgccgccatttgccggacggcggcaagctgacactgaccaattttcattttacccattatgaaaatgggcacgcggtggagcagcgaaatctaccggatgtggcgagtttatatgctgtgatgcaagaacagtttggtctgggcgtggatgatgcgaaacatggctttaccgtggatgagttagcgctggtgatggcggcgtttgatacgcacccggaggcgggaaaataatttatgtcaggttgccggatgcggcgtaaacgccttatccggcatacattagcccggttgtagacctgacaggcgaagcgcatcagacaacggtttcagagttcaattgcccattcggcatgaaacaaaatcaccgctgtgccactaatggtgactttttccggttggttatcacgaattgtcaccgtcacttcaatcataccgtcacgccccaatgcgcgcccctgatggcctttaacacgcaacacgttgccatcgtggggcaatacgttgtgatgtaccaaccatgcacccatcgggccattggcattgccagtcaccggatcttccacaataccaatcgcagggctgaacatgcgaccatcggtttcgtttttgcctgggcggatctggaacgggaagaaaccattgcagccaatctttttgctgatagcggtcagcgcattaaggtcagggctaagggcgtcgatatccacttccggtttcagtgggatcatcactttactgtgtcctgttgttgccacctgaattggcaagcctggcagaatatcgtcctcagtgagatgaagcgcgttgataatcgccgcacgtgtttcaccttccagcggtggctcaaagcccggcgtaccttgttccaggctaatacgataatcatcgttgtgcttttcgatagtcacgcgatgttttcctgccaggcttgtttgccagatcgtgcaatttcctaaacctaacaccttcgcacgtacatagtgcgcagctactgtcgcgtgaccgcaaatcggcacttcaaccgttggcgtaaagtagcggatgcgcacatcgctgtcgtcgctgtgcagcagaaaagcagtttcgctatggcctaactcgcgggcgataagctgcatttgcgcttcgctaagattatcggcggggaaaacaacaccggcagaattgccgcgaaacggttgactggtaaaagcatcgacgtggtacacctgcggtttcattaacgttctcctgtgactggagaactatcatagcctgcaagtggccggagagcgaagggctatccggccagggtgaaattatcgccggctacgcacaatttgatatcgacgagtaaagtactcaaacggcgcgctccacacatgcaccagtcgggtgaacgggaagagcaggaagatggtcattcccaacaccagatgcaggcggaagacgaacgctacgccgttgagcatctcactgcttccaccacggaaagtgacaatgctttgcgcccaacccaccagcttcatcatttcgctaccatcaggatactgtgcactaaacggtatggtacttagccccaacagacactggatcagcaaaatgctcatgatgatgatatccggcgtagtggaagtggcacgcacgcgctgatttgtcagcctgcgccacagcagtcctgcgccgccaatcaacgtcaacacaccgcaaataccgccgagcaccatcgccatgagttgtttcgctgccactggcaaaaaccacgcgtacatccagtgcggcgttaacatgccgaacaagtgcccgaagaaaatccccaaaatgccgatatggaacagattgctccatatcaccatcccgcgtttatcgagcatttgactactggaggcgcgccaggtgtactgcccgtagtcgtagcgcagccagctgccgaggaaaaacaccgtcgcacaaatgtacgggtagatatcgtaaaaaaagacgttcagatactgaatcatttcccacctcccgcactgatgtcgacatattgcggcgcgacatcctggctaaagcgtcgctgatattgattaagcgggctgctgtcacacgccgtggcgttatcttcaataaacttcacctgttcctcttcccacactgcatcaagcgcctggcgggtgtcatcgcgctcttcgctgtttacttgttttgtgacactgtcactactaagggagcttcccgccagttgcagcagagcatcaaacaacgcgtaccacggtgcctcgcgttgttttaagcgaccgccaagcagggcgaggatcggcgcaacattgagcaatccttctttcgcctgatcgtcaggcagtacgcttaaatactccagatacagcggtagataatcgggcagttcccgacaatccagctgcaggccgaccttttcatactccgccagcaggtccaccattgcctggccgcgatcgcgggactcggcatgaacatgttcgaacagcagcaggctcgtggtgcgcccgcggtcaaacacttcgcaccattcggcctgtttatccagcagcggcgcgttaagcaggttgtgggtgaaatccgtaagcatcggcgcgtcgcggcggatcaacgccagcgcgtcctccttgcattcccacaacagctcgtccggatactccatcaacaggccgatcactttgaggatctgcattattcgccctccgctttgtcgcgcacttcggtgatgttgatggcatcgatacggctactgttgaacaggttgaatttactgtcgctaccgtggcaaccgtcgccaaaggtaaaaccgcagccgttgcgttctgcgaaggcatcgcccgccatttcccgatggctggtcgggataacaaaacgatcttcatagttggcaatggcgagatagcgatacatctcttcgacctgggcgacgctcaggcctacttcgtcgatggcacgagtatcagtaacgccttccacggtttgactacgcatatagtggcgcatcgccatcatccgtttcagcgcccgcagtaccggaccggtatcgccggcactcaacatattggcgagatattgcaccggaatacgcaggctttcgatggcgggcagcacgccttcgcttttcggcaaaccgcccgcatctgcgtaggactgaatcggactcagcggaggaacgtaccagaccatcggcagggtgcggtattcagggtgcaacggtagtgccagtttccagtccatcgccattttgtagactgggctacgctgggcagcgtcaatcacattttgtggaataccttgtttcagggcttcctcgatcacactgggatcgtgtggatcgaggaacacttcgcactggcgttcatagaggtcaacttcgcgctcggtgctcgccgcttcctcgatgcggtcggcgtcgtaaagcagcacgcccagataccggatgcgacccacgcaggtttcactgcacacggtcggttgaccggactcaattcgtgggtaacagaagatgcatttttcactcttgccgcttttccagttgaagtagatttttttgtacggacaaccgcttatgcacaaacgccagccacggcatttatcctgatcaatcagcacaatgccgtcttcttcgcgtttgtagatagcgccgcttgggcaggtcgccacgcagctgggattgaggcagtgttcgcacaggcgcggcaggtacatcatgaaggtgttttcaaactgcccgtacatctccttttgcatggcctcgaagttgcggtcgcgggcacgtttttcgaactcaccgcccagcagttcttcccagtttggcccccagatcactttgtccatccgtttgccgtcaatcagactacgcgggcgagcagtaggaatatgtttgccttccggtgcgctatgcaaatgttcgtagtcgaaggtgaaaggttcgtagtaatcatcaatctgcggcaccaccgggttggcgaagattttggttattacgcccatcttgttgcccagacgcgggcgtatcttgccattcacatcacgcacccagccgccttgccactcttcctgatcttcccagtttttcggataaccaatgcccggtttggtttcgacgttgttaaaccatgcgtactccatgccttcgcgcccggtccagacgtttttacaggtcacgctacaggtatggcagccgatacatttgtcgaggttaagcaccatgccgacttgactacggattttcattttttcgcctcctgtacctgatcgcgaccttcatcatccagccagttaacgttcttcatcttgcggatcatgatgaactcatcgcggttgcttccgacggtgccgtagtagttaaagccccaggccagctgcgcgtaaccgccaatcatatgcgttggtttcgggcaaacgcgggtaacgctgttatgaatgccgccgcgcatgccagttacttcgctaccaggaatattcataatgcgttcctgggcgtgatacatcatggtcatgcccggcggtacacgttggctgaccaccgcgcgggcagtcagcgcgccgttggcgttgaatacttccacccagtcgttatcgacaatggtcagttctcgggcatctgtttcgctgatccagacaatcggtccaccgcgagagagcgtcagcattagcaggttttcactgtaggtactgtgaatgccccatttctggtgcggcgtcaggaagttaagtgctttttccgggaagccgtttggcggtatctggcgcatctcactgacgctacgggtgtcgataggcgggcgataagccaccaggctttcaccaaaagcacgcatccacggatgatcctgatagagctgctggcgtccgctcagcgtgcgccacggaattaactcatgaacgttggtgtatcccgcgttataggagacgtgatcgctttccagaccggaccaggtggggctggagataattttacgcggctgcgcctgaatatcgcgaaagcgaatcttctcgtcctctttgtgcagcgccagatgggtatgttcgcgcccggtgatctcgcccagcgcctgccacgctttgactgcaacatgaccgttggtttccggtgccagtgccagaatcacttcactagcgtcaatggcggtgtcaatcagcggacgcccctgtgccgggccatcacgcttggtgtaattgagtttgccgaggaaatcgatttcatcctgggtattccagctaatccctttaccgccattgccaagtttgtccatcaatggcccgaggctggtaaagcgttcatacgtagcagggtagtcgcgctccaccgccacaatattcggcgcggttttgcctggaatcagatcgcattcgcctttgcgccagtcgagcacttcacacggctgactgagctctgccggagagtcatgcagtaggggttgtaataccacgtcggtttctttgccaagatgacccacgcacacttggctaaatgctttggcgatacctttgtagatttcccagtcgctgcgactttcccacgccggatcgaccgccgcagaaagcggatgaataaacggatgcatatcgctggtgttcatatcgtctttttcgtaccaggtggcggtgggcagaacgatatcggagaacaggcaggtactggacatgcggaagtcgagcgtcaccagcaggtcgagcttgccttcaatcgctgcagtttgccactcgacttcttccggtttgatcccgtcgctggcaccgagttcctcgccctgaatcccgctttcggtccccagcagatacttctgcatatactcgtggcctttgccggaggagccaagcaggttagagcgccagacaaacaaattacgcggatgattgctgctgctatctggttgttcgcaggccatacgtaaatcgccgcttttcagcgcctgggcggtaaattctgtgggggataatccggccttgtcggcttcagctttaatcccgagcgggttacgccccagctgcggcgcagaaggtagccagcccatacgttcggcgcgaacgttgaaatcaatcagatgaccgctgtacttactggcatcggcgagcggactaagtaactcctgagcagagactttttcatagcgccattggctggaatgattgtagaaaaagctggtgctgttcatttggcgcggtggtcggttccagtcgagcgcaaaggccagtggcaaccagccggtttgtgggcgcagtttttcctggccgacatagtgtgcccagccgccaccgctttgcccgacacaaccgcagaagatcagcatattgatcatcccgcggtagttcatgtccatgtgataccagtggttaacacctgcgccgaggataatcatgctgcgcccatgcgttttatgggcggtatcggcaaattcacgggcgatggtttcaatatactggcgcggcacgccggtaatttgctcaccccaggctggggtgtacggtttgatttcagcgtaatctttcgcactgttttcatcttccagcccgcgatcgaggccgtaattcgccagtaccaaatcataaacgctgaccaccggacaggtgttgccatcgactaacgtcaggtttttaacgggcaattggcgcaccagcaccggattgtgttttacgctgcgaaaatgcggattttcaatgccgccaaagtaggggaaggccacgcctgcaacagcgtcatgttgaccgagcagggttaagctcaattcggtttccgtaccggcggcaatggattccagattccatttgcctttttctccccagcggaaaccaatgctaccgttcggcactaccaattcacctgcggtattaactgctacggttttccactgcggattgttgctttcgcccagtccatccaccaggtcagatgcgcggatcatgcgcccgggaacgtagctaccatcgtcgcgaggctccagcattaccagcatcggcatgtcgctgtagcggcggcagtagttgataaagtagtcgctgggattatcgagatgaaactcttttaaaatcacatggcccattgccatcgccagggcgctatcagtgccttgtttcggtgccagccactggtcgcacaatttggccacttcagagtagtcaggggtaatggcgatggttttagtgcctttgtagcgtacttcggtaaagaagtgggcgtccggcgtacgtgtctgcggtacgttagacccccaggcgatgatgtagctggagttataccagtcggcagattccggtacgtcggtttgctcgccccaggtcatcgggctggcgggcggcaggtcgcaataccagtcgtagaaacttaaacaggtgccgccaagcaggctcagataacgcgttccggcggcgtaagaaaccatgctcatcgccgggatcgggctgaaaccggcaacgcgatccgggccgtaggttttgatggtccagacgttagcggcggcaatcagctggtttagttcctgccagttggagcggataaacccgccgcgcccacgcacttgtttgtagctcaggcacttttgcggatcgttcataatgcttgcccacgccagtaccggatcgctgtgttgcttgagggcttcgcgccacagttcaatcagtcgtttacgaatgagcgggtatttcaggcggttagcgctgtaaagataccaggagtaacttgcgccacgcgggcagccgcgaggttcatgattgggcaggtcagggcgagtgcgcgggtagtcggtctgttggatttcccaggtcaccagaccatttttaacgtagattttccagctacaggagcctgtacagttaacaccgtgggtggaacgcacgattttgtcgaactgccaacgctggcgatagctgtcctcccagtcgcggttgctatgcatcacctgtccgtgaccatcggcaaaggtttcgcccttttgtttgaagtagcgaaagcgatccaaaagtttactcatgacatgactcctgctccaggaatgaattgggatctgatgccttgtcggatgcgacacggttgtacatcaggcatcgatctcttatttttggctgaacttccgccgaccataaaccagccaggtcagcagcacacaaacgatgtagaagattaaaaacactttcatcgcgccgaccggagagccggtcatattgaggctcatgccaaacgcctgcggaataaaaaagccgcccactgcgccaatggcactgataaagcccagagccgccgccgtttcggtgacggcttctttatgagcttgctcatcactaccgcctttcatctttacccgataaatggttatctggcgaaagatgacggcgatcatctggaaagtagaaccacttcccagacccgcagtcagaaacagccccataaatacggcgtaaaaggcgatgaaattaccggagcctgtgcccggtaaggtaaggaacagcagggcactgaaaatcgccataaaaataaagttgatcaacgtcacccgcacgccgccgaacttatcggaaatagcaccaccaacgctccgcgcgatggcaccgataaatgggccaaagaacgccaggcgcagaatattcacatccgggaactgggtttttgccagcatggcaaaacccgcagaaaaaccgataaagctaccgaaggtggcaaggtaaagcaggctcagcagccagagatgcaggcgttgtaagacagggagctggtcggcaatactggcgcgactactggcgatatcattcatcccactccatgcggcgatcgtggcaatcgccagtagcggtacccaaatccatgcggcattcgccaggctcatcacgctaccgtcggcctgcggtacgccattgacgccgagaaaggcaaatacaggtacaaaaatgaccagcggtgcaaccagctgcattacacttacacctaagtttcctaatccgccattaatcccaagagcgctcccttgtttggcttttggaaagaagaaactgatattgcccatgctgctagcaaagtttgcacctgcaaaaccgcatagcaaagcgataacgataaatatcccaaaaggagtattcggattttgcacggcaattccgagccagacgcaaggaataatcaggattgcagtactaaaaaccgtccatcggcgtccaccgaatataggcaccataaaggagtagggaacacgcaataatgcgccagaaacggagggtaatgcggttaataaaaagagttgatcggtagtaaaattaaaaccgattttattgagattaacggtaactgcgctaaatagcatccagacacagaaggcaagaagtagacaactgacacttatccagagatttcttcgagcaatatgttttcctttattttcccagaaggccggattttctggtttccagtcgcgcaaaagataacgactatttttctcattttgcagtgccatattgttcctcacatgcacacattggtaatgaaaaaaagacaaaacacgaggtaaggcgcaatagccagttattagaattaaggatgaattgggtgaagtgctgattgaaagaatagataagaaagcgtaaccgcgggggcagaatggggattaagtagccagatatgtgttactaaatgtaactaacaagctaaccttcaaacggggttaatctttgaacgtatgtcatgtttcaacccttcagatcgtgaatctaaagggttacatattaactatattatcaacaagaccagacacttatagaattagtgatgatttattcattaaaaaggccaactactggaggaaaagcttctgtccagaaggtctatcggttcctctcttattgcctgattgtaataatcgttattacagtaagtattgtttatttcatctaaggtcatgtttttaacttttatattcatctggtttacaacttcctctgtcttgtaagtgtgtatattatatggggtatatgcttttttaataggatagtgaaacaattcgttatccacatctattccgtcagagtgaacttcaaatgcaccagggctaagaattgccaggccagtattaagcttaagtgctggggaaaacaaattaaataacatgagctgcatagtagggcaattgttcttcccagaaacatttaaaaaatttaagttttgctctgttttattatggggaataaagttccaatatcggatgtattattagtatcaatgtgggttattttattattgtccagtcttaaacttttgatagatggaagataagtcaggaaatcaagatttatatatttcaactggttgttagcagcgtttaatgtctgaacattgcagaagttgctatagaatattttaatttcagaaagcaaattgttgttaataagtaacgtattcaagttgggaaataagtcattgtgtaaacttgttagtttattatgggatagatccagcagtaagagttcatttttattacctgcaacaatatcagttaattgattatggctgagattcaggtattgcagccattcgcaagattctaattgcacaaactctagttgattatgtgccgcactaaaataagtaacactactaagcctatctatatcaatatttctgagagcattattattcatagatatatgtgtaatacttacatttctgccttgaggaaaatttatactctcaagagcattactattcagacttagctttacgagtctatcgtagttggttgcatcaaaatgtgtgaattggttattatcaagattgatagatgtgaagttttgcagccctggtggttgagtggttaaattaagtccacttaaatcaatggtcacttcattagtgtcatcaattatatttcttactgcagtccagtactgcatttgtgcaagtggatcattgttgatgccgttaactaatacatgccaaagatgtttactacttattagttgatcaatgtcattggttggcagtaaattgttattgcttaagtttaaatattccagttttgtagtgtttttggcgtttaaatgtgcaatatggttgtcgtttaaagtgattgttttcatcctgggatgattgtgtaatataaggtcagtgatcatattgtgatgggcacttaactcaatcagagattcttgccgcggctgccgttggcttcatcgttatagcctttaaaatcatattcccagtgaccaaaaccaatcatttgatcattgatttgcgtttctcctttaaagccgagacgggcataagttttatcaccatcgtcacgcttatcatcagtaaaataacgtagagcggtaaccttgccataaaggtcgagtttattaccatccttgttatagacttcggcagcgtgtgctacgttcgcagctaacaaaccagttacaaccaccgcaactatttttaatttcatttaacagaatccttttaattatcgttaaacgtattttctaaacgaattttaaacggcgtcatttataaatgacatactgtttttaaaatagaatggtgattaaaaacaatgagaaaaatagatgaaataatattatttatcgatatgtgatcgaagtcgaaatgagatataaggtgaattactggtatttgaaatttatttttttaatattgtcggaatttatctgattaactaccgggccgtagacccggcagttattttaaccacgacgtgtcgccagccagcagagcagggaaccgccgcagaccatcagcgcgccttgccagaagctgaagctcagcggggcgctgagcagcacggctgcaagcgcactggaaagtacaggcgtaaaatagctacctaccgccataatggtgacattgccatgcaatataccgacattccatgcagcataagcaaatcctaaggtaaatgccgcagagatgagtttaatcatgacgggcgtgctaaatatcatttctggttgtggcgtaagaaaatagtaaacccacagacttgctcccgttagcaggacaaaaacggtaattccattaaatccgcgtgcgtatttattcgttactgtgcaataggctgcccagataaacgcaccaatgaacgccaggaaataactcaatgggctggtggtgatattattgatgatttcatcataatgtaacccattgtcaccgcctaacacccaacagacgccgacgagggctaataataatccaggtacaatcaaccagttggttttctgaccattaaacagaatggcaaagagaattgtcaggctgggccacagatagttcaccatacccacttcaatcgcctgatgatgggtcgccgcataccctaaggaaagcgccagacagatttcatagctgacgaataacagactcccggcgagtaaatagcctttcgggatttgccgaatacgcggaaatccaaccgtgaagattaacagcagcccgcttaaactatagatagcagctgcgccgccgaccgggccgagcccctcactgacaccgcgaatcaatcctaccatcgtgctccacaggacgatcgctatcagccctatgagcgttgctttttgtcgtgtcatgctcgctgttttgtctctcttgccgttaaaaattaagctgaattttatagcatttttttaactggcctgtcaggcagtggtgcgtttttctaccgctattgaggtaggtcaatttgcgaaggcggattattttgtggcaaacagatgttctttttgatttcgcgcaaaaagattcagaattttactgttagtttcctcgcgcagtaatacccctgaaaaaagaggaaagcaatggacgtcagtcgcagacaattttttaaaatctgcgcgggcggtatggctggaacaacagtagcggcattgggctttgccccgaagcaagcactggctcaggcgcgaaactacaaattattacgcgctaaagagatccgtaacacctgcacatactgttccgtaggttgcgggctattgatgtatagcctgggtgatggcgcaaaaaacgccagagaagcgatttatcacattgaaggtgacccggatcatccggtaagccgtggtgcgctgtgcccgaaaggggccggtttgctggattacgtcaacagtgaaaaccgtctgcgctacccggaatatcgtgcgccaggttctgacaaatggcagcgcattagctgggaagaagcattctcccgtattgcgaagctgatgaaagctgaccgtgacgctaactttattgaaaagaacgagcagggcgtaacggtaaaccgttggctttctaccggtatgctgtgtgcctccggtgccagcaacgaaaccgggatgctgacccagaaatttgcccgctccctcgggatgctggcggtagacaaccaggcgcgcgtctgacacggaccaacggtagcaagtcttgctccaacatttggtcgcggtgcgatgaccaaccactgggtggatatcaaaaacgctaacgtcgtgatggtgatgggcggtaacgctgctgaagcgcatcccgtcggtttccgctgggcgatggaagcgaaaaacaacaacgacgcaaccttgatcgttgtcgatccccgttttacgcgtaccgcttctgtggcggatatttacgcgcctattcgttccggtacggacattacgttcctgtctggcgttttgcgctacctgatcgaaaacaacaaaatcaacgccgaatacgttaagcattacaccaacgccagcctgctggtgcgtgatgattttgctttcgaagacggtctgttcagcggctacgacgctgaaaaacgtcaatacgataaaagctcctggaactatcagctcgatgaaaacggctatgcgaaacgcgatgaaacactgactcatccgcgctgtgtgtggaacctgctgaaagagcacgtttcccgctacacgccggacgtcgttgaaaacatctgcggtacgccaaaagccgacttcctgaaagtgtgtgaagtgctggcctccaccagcgcaccggatcgcacaaccaccttcctgtacgcgctgggctggacgcagcacactgtgggtgcgcagaacatccgtactatggcgatgatccagttgctgctcggtaacatgggtatggccggtggcggcgtgaacgcattgcgtggtcactccaacattcagggcttgactgacttaggcctgctctctaccagcctgccaggttatctgacgctgccgagtgaaaaacaggttgatttgcagagctatctggaagcgaacacgccgaaagcgacgctggctgatcaggtgaactactggagcaactatccgaagttcttcgttagcctgatgaaatctttctatggcgatgccgcgcagaaagagaacaactggggctatgactggctgccgaagtgggaccagacctacgacgtcatcaagtatttcaacatgatggatgaaggcaaagtcaccggttatttctgccagggctttaacccggttgcgtccttcccggacaaaaacaaagtggtgagctgcctgagcaagctgaagtacatggtggttatcgatccgctggtgactgaaacctctaccttctggcagaaccacggtgagagcaacgatgtcgatccggcgtctattcagactgaagtattccgtctgcctagcacctgctttgctgaagaagatggttctatcgctaactccggtcgctggttgcagtggcactggaaaggtcaggacgcgccgggcgaagcgcgtaacgacggtgaaattctggcgggtatctaccatcatctgcgcgagctgtaccagtccgaaggtggtaaaggcgtagaaccgctgatgaagatgagctggaactacaagcagccgcacgaaccgcaatctgacgaagtggctaaagagaacaacggctacgcgctggaagatctctatgacgctaatggcgtgcttattgcgaagaaaggtcagttgctgagtagctttgcgcatctgcgtgatgacggtacaaccgcatcttcttgctggatctacaccggtagctggacagagcagggcaaccagatggctaaccgcgataactccgacccgtccggtctggggaatacgctgggatgggcctgggcgtggccgctcaaccgtcgcgtgctgtacaaccgtgctagcgcggatatcaacggtaaaccgtgggatccgaaacggatgctgatccagtggaacggcagcaagtggacgggtaacgatattcctgacttcggcaatgccgcaccgggtacgccaaccgggccgtttatcatgcagccggaagggatgggacgcctgtttgccatcaacaaaatggcggaaggtccgttcccggaacactacgagccgattgaaacgccgctgggcactaacccgctgcatccgaacgtggtgtctaacccggttgttcgtctgtatgaacaagacgcgctgcggatgggtaaaaaagagcagttcccgtatgtgggtacgacctatcgtctgaccgagcacttccacacctggaccaagcacgcattgctcaacgcaattgctcagccggaacagtttgtggaaatcagcgaaacgctggcggcggcgaaaggcattaataatggcgatcgtgtcactgtctccagcaagcgtggctttatccgcgcggtggctgtggtaacgcgtcgtctgaaaccgctgaatgtaaatggtcagcaggttgaaacggtgggtattccaatccactggggctttgagggtgtcgcgcgtaaaggttatatcgctaacactctgacgccgaatgtcggtgatgcaaacagccaaacgccggaatataaagcgttcttagtcaacatcgagaaggcgtaagggggcgaacagatggctatggaaacgcaggacattatcaaaaggtccgcaactaactccatcacgccgccttctcaggtgcgtgattacaaagcagaagtcgcaaaacttatcgacgtttccacctgtatcggctgtaaagcctgtcaggtggcgtgtagcgagtggaacgacatccgtgatgaagtggggcactgcgtcggggtttacgataaccccgccgatctgagcgccaagtcctggacggtgatgcgctttagcgaaaccgaacagaacggcaagctggagtggctgatccgtaaagacggctgtatgcactgtgaagatcccggctgcctgaaggcgtgcccgtctgctggtgcaatcattcagtacgctaacgggattgtcgatttccagagcgaaaactgcatcggctgtggttactgcattgccgggtgtccgtttaatattccgcgcctcaacaaagaggataaccgggtatataaatgcacgctctgcgtcgatcgcgtcagcgtcggccaggaaccggcttgtgtgaaaacctgtccgaccggggctatccacttcggcaccaagaaggagatgctggagctggcggaacagcgcgtggcgaaactgaaagcgcgtggttacgaacatgctggcgtctacaacccggaaggggtcggtggtacgcacgttatgtacgtgctgcatcacgccgatcagccggagctgtatcacggtctgccgaaagatccgaagatcgacaccagcgtaagcctgtggaaaggcgcgttgaaaccgctggcagcggctggctttattgccacttttgccgggttgattttccactacatcggtattggcccgaataaggaagtggacgatgacgaggaggatcatcatgagtaagagcaaaatgattgtgcgcaccaaatttattgatcgcgcctgtcactggaccgtggtgatttgcttcttcctggtggcgctgtccgggattagcttcttcttcccgacgctgcaatggctgacgcaaaccttcggtacgccgcagatgggacgcattttgcacccgttcttcggcattgcgattttcgtcgcactgatgtttatgtttgtgcgttttgtgcatcacaacatcccggataagaaagatattccgtggctgttgaacattgtcgaagtattgaaaggcaatgagcataaagtggcggatgtcggtaagtacaacgccgggcaaaagatgatgttctggagcatcatgagcatgattttcgtgctgctggtgaccggggtgattatctggcgtccgtactttgcgcagtacttcccgatgcaggttgttcgctacagcctgctgatccacgcggctgcgggtatcatcctgatccacgccatcctgatccatatgtatatggcattttgggtgaaaggaagcattaaagggatgatcgaagggaaggtaagtcgtcgctgggcgaagaaacaccatccgcgctggtatcgtgaaatcgagaaggcagaagcgaaaaaagagagtgaagaagggatataatctcttttgaactttaagctgaaaatggcgctgtaaaaggcgccattttcatattgtagacaacgtaggctttgttcatgccggatgcggcgtgaacgccttatccggcatgaaaacccttcaaatccaatagattgcagtgaacgtgtaggcctgataagcgtagcgcatcaggcaatgttgcgtttgtcatcagtttcaaatggcgctgtaaaaggcgtcattttcatattgtagacaacgtaggctttgttcatgccggatgcggcgtgaacgccttatccggcatgaaaacccttcaaatccaatagattgcagtgaacgtgtaggcctgataagcgtagcgcatcaggcaatgttgcgtttgtcatcagttctaaatggcgctttataaagtgccatttttttattgcgtaaccagacggcgtaatcggctcacatccactgttttttctgcctctgccagactccaggcgttttgcagattcagccacatttgcgggctactgccgatcaccacggaaagtttaatcgccatttctggcgtcaaagctgcttttcctgtcagcaatcggcttgccgtactgggagcaatttccattgctctggcaaactcgcgcaggctgacattaagttcgtccagactttcctgaataatgtcccccgggcggggatgattggccattttcattagtgtctttactctcagtagcgttccttcactgggaacactatcattattgttccttcctacgcaacaataatccatttagccatttcatgttggagagtgtgcgatgctgcgacccgaacatggcagtcgcagcaaaggcctcttagtgacggaaatcaatcaccatgcggccacggattttgccttcttccatctcagtaaagatggtgttgatgtccgctaacggacgcagggcgactttcggcaccactttaccttcggcggcaaactggaaggcttcagttaaatcctggcgcgtgccgaccaggctaccgaccacttcaataccatccagcacaagacgtgggatatccaggctcatagactccggcggtagaccgacagccacaacacgaccgcctgcacggacagcatcaactgcgctgttaaacgcagctttagctaccgctgttaccaccgcagcgtgagcgccaccagttttctcctgcacaattttggcggcgtcttcggtgtgactgttaatcgctaaatctgcgcccatttcggttgccagttttaactgctcatcattgacatcaatggcgatcactttggcgttaaagacattcttcgcgtattgcagggcgaggttacccagaccgccaagaccgtagatagcaatccactgccctggacgaattttactcagcttaacggctttgtaggtggtgactcccgcacaggtaatgctgctggccgccgcgctgtccagaccatctggcacttttaccgcgtaatcggcgaccacgatgcactcttccgccatcccgccatcaacgctgtatccggcatttttaacactacggcagagcgtttcgttaccactgttacagtattcgcaatgaccgcatccttcgtagaaccacgccacgctggcacgatcgcctggttttaaactggtgacacctggacccacttctgccaccacaccgatgccttcatggcccagaattacgccggttttgtcaccaaaatcgccattcttaacatgaagatcggtatgacatacaccacaacactccattttcagcagggcttcgccatgtttcagactgcgcagtgttttatacgtaacgtcaacatgatgatccttcgtaacaactgcagccttcatagttcctccttttcggatgatgttctgcatagcaggtgaggcaaatgagatttattcgccactacccagtatggatgagatctgaaaaagggagagggaaatagcccggtagccttcactaccgggcgcaggcttagatggaggtacggcggtagtcgcggtattcggcttgccagaaattatcgtcaatggcctgttgcagggcttcggcagaggttttcaccgccacgccttgctgctgcgccattttgccaaccgcaaacgcaattgcgcgggagactttctgaatatctttcagttccggcagtaccataccttcgccgttcagcaccaatggactatactgcgccagcgtttcacttgcgctcatcagcatctcatcggtgatacgactcgcgccggaagcaataacacccaggccgatgcccgggaaaataaaggcgttgttacactgggcgatagggtagattttatctttccataccactggattaaacgggctgcccgtggcgaccagcgcgttaccttcggtccaggcgataatgtcctgcggtgtggcttccacgcgactcgtcgggttagacagcggcatcacgatcggacgcggacagtgtttatgcatctcacggatgatctcttccgtaaacagcccggtctgtccactgacgccaatcagaatatctggttttacattgcgcaccacatccagcagactcagcacatcgctgtcggtatcccagtcactgaggttttcgcgcttctgcaccagtttggtctggaaaggcagcaggttcggcatcttgtcagtcagcaagccaaagcgatcgaccataaagactttctgccgcgccgcttcctcgcttaatccttcgcgctgggtctgggagatgatcatttcggcaatgccgcatcccgcactacctgcgccaaggaagacgatttttttctcgcttaactgaccacctgccgcgcggcttgctgcgatcagtgtgccgactgttaccgccgcagtgccctgaatgtcatcgttaaaagaacaaatttcattgcgatagcggttaagtaacggcatcgcatttttttgagcaaagtcttcaaactgcaacagcacgtctggccagcgttgtttcacagcctggataaattcatcaacgaattcatagtattcgtcgtcagtgatacgcggattacgccagcccatatacagcggatcgttaagcagctgttggttgttcgttccgacatccagcaccaccggaagggtatacgccgggctgatgccgccacaggcggtatagaggctcagtttaccgatcggaatgcccatcccgccgatgccctggtcaccaagccccagaatgcgttcaccgtcagtcaccacaatcactttaatattatggttcggcacgttttgcagaatatcgtccatattgtgccggttctggtaagagataaacacgccgcgactacggcggtagatctcagaaaaacgctcacaggctgcgccgacggttggggtataaataacaggcatcatctcatcaagatgattgtttaccagacggtagaagagggtttcgttagtgtcctggatgttacgcaggtagatgtgtttgtcgatttcggttttgaatccctgatactggatccatgctcgttccgcttgttcttcgatggtttcgaccacttccggcagtaaccccagcaggttgaagttacggcgttcttccatgctgaaggcactgcctttattcaacaacggaaattccagcagtacagggccagcgtaagggatataaaggctacgctgtttttttgtttttggttccatgtcactcactcttttttgaatatccatccctggggggcttttatcgtctttgctttaccgccagggcgtcggcctcaagtataaagcagataaaaacaaaaacaccattgcgcaggcaatggtgtttaatcgtcattgaggactgatggttatgaattacttttcagcggggcgttttctgccggttgggttatttactacgctggatttgtcaccttcggtaactattttgcgctggttagaaattttatggtccagtccaagaatatgacgtgcctgacggttgcttttcattttaactcctcaatcctgtagctagttttaaggacaacatcgccgtagcgaagaaacacgtgctaaacccctaaattaggttgccgatcaagcatagcaccttaaagcgtagggtgctggccactgaccacataattgatcgtttgctggtagatatcactgaggatgtcgttatcagaagcttcaacccatttggtcagctccatgagaatgtcatcttcagtgacaacaccatgctgtgcccgaaggccttgctcaatggcattaaccagagcgggttctgctgtactattttctgcctgataataagtaaacatagtgattctccgtgtctgtgtatttatggtgtctgctacggatcgcagatttataaagcacattcagcatggcaaatatttgccgcttcgttgttaagattagtcctggttgatgatttttatattttaacaccatgatattcatagggattgtgattggtatgatccgattaatattgatacaatatcttttgggttatatattcccggtaatctattgtgggaatttaatttaagtgcagaagtaatattttcgccggattttattcggaatatcctgcttatcctcgtgctgtttctcacgtagtctataatttcctttttaagcccacaggagagcaacaatgacaatccataagaaaggtcaggcacactgggaaggcgatatcaaacgcgggaagggaacagtatccaccgagagtggcgtgctgaaccaacagccgtatggatttaacacgcgttttgaaggcgaaaaaggaaccaaccctgaagaactgattggcgcagcgcatgccgcatgtttcagtatggcgcttagtttaatgctgggggaagcgggattcacgccaacaagcattgataccaccgccgatgtgagcctggataaagtggatgccggttttgcgattacgaaaatcgcactgaagagtgaagttgcggtgccgggtattgatgcctctacctttgacggcataatccagaaagcaaaagcaggatgcccggtctctcaggtactgaaagcggaaattacgctggattaccagttgaaaagctaaagcattgccggatgacgcgtcaggcgcgtgaatgcctgatgcgttgttagcatctttacagcgcccgccagcaccggagctcacgtccgtcctcccttattgctaaactttgccggacttcacatccgtgggttgccagcgggcaacgttcgtagaaaaaacagccttgcggcaacgtgcggtttcccggcagatccgttttacgtaatgcccattcttcctccagcggtttatcaatggcggggagggaatccagcaataatcgggtgtatggatgtgcaggtgccgtcagcacctgctgcgcgtcgcccagttctacaatctgcccgagatacatcaccgccacccgatcgctcatatgacgtatcacgctgacattgtgactaatcagcacataggtcagcccgtgattttcctgtagcgttaccagtaaattgaggatctgcgcctgaacggagatatccagcgcagaggttggctcatcaagcacaatcacgtcaggctggctagagagtgctctggcaatggcgatacgttgccgctgcccgccggagaacgcatgaggcaggcggtcgagatactccggacgaatacccacctgcacagccaactcctctgccaacgctcgccgctgttgttcactactacgcttagctatccagagcggttctgtgatgatgcgccacaccggtaagcgcggattaaggctagagagcgggtcctgaaacaccatctgcataatgcgttgactgccagaacggatgtactgcccgtggctcggttgcagcatacccattaaaagctgtgcgagggtgcttttgccgcagccactctcgccgacgatccctaaggtttcaccacggcggatctgtaaatcaataccattaatggcatgaacatgttccgtagttttaccaagccagtttttacgggccgggaaattgatatggacgtcgcgtaacgttaataacgtgtcagacacttataacctcctgctgcggataccaacaggcacagcgctggttgttgtcaccacacgctgtcagcgccgggacgttttcacactgtgcacctgccgcatagcaacgatcgcgaaaagcgcagccgtcaggcaaatgggtgaggtttggtaccgtccctggaatggcgggtaatagctggcgtggtactccatgttctggtgcgcattgcagcaaaccaatggtatacggatgccggggatgatggataacgtctgccgtcacgccgctttcaattacgcttccggcatacatcacgtaaacgctatcgcacagttggctcaccacggccatatcatggctgatgaacagaaccgcagttccactggcgcgggctttatgtttaagcaaacgcagtacctgcaactgcaccgtgacgtccagcgccgtagtcggttcgtcggcaataatcaattgcggctcgcaggagaatgccagcgcaatcattacccgctggcgcataccaccactaagctcaaacggatagcggctcataacttccacggcatccgggatttgcatctcttccagcaggtcaatcgctttagctctggcttcccgacgacttattggttgatgatggcggatcacgtccatcatctgaagacctattcgacgtgtcggattgagggcggtcatcggttcctgaaagatcatcgccactcgtgcgccgcgccactgacgaagctgtttttcccgcgcgttaagaacatcttctcccagcagggaaatctgcccccgatgtacgcaataactgcccgtcggtagcagacgcataatcagcattgcggtgacacttttaccactgccggattctcccaccagaccgacaatttcaccgcggttaatctgcaaggacacattgttgagcgcgtgaacatcaccgttaaaaccggggaaactcaaatgcagttgttgaatgtccagaacgggttgggtcatgactgctttcctcctgctttttagttcaactctgctttcctcctgctttcgggtcaagcagatcgcgaataccatcaccaaagagattaaacccgacggcggtaagcaaaatcgctgcccccggaaatgcgcaataccaccactgatcgagtacatagttgcgaccatttgctaccatcgcgccccattcagcactcggttgttgagcacccaggccaataaatcccaacgtggcggccattaaaatcgcgctaccgatatccaggcttgcctgcacgatcagcggcggtagggagttacgtaaaatatgccagttgatcagatgccaacgagacgcgccaaaggttttcgccgcctgaacataggtatactggcgtacaactaatgcttgcccccgcgccaggcgcacataaaagggaattcgcacaatagcaatagccagcatggcgttaaacaaactcggcccgagagcggcagccagtgccattgtcagtaccaagctaggaatgctcagcataatgtccatgatgcgcatgatgatggcgtctgcgcgtccaccaagcacaccggatagacatccgagtaggctaccaatcatacccgcaatggcaaccacgactaatccggcgagaatactttgctgactgccgaccagtacgcggctaaacagatcgcgtcccacttcatcggtgccaaaccagtgcgccgcagaaggcggcaaaaggcgggcggttaaatcaatggcgttgggatcatgcgtcgccagccacggactaaaaatcatcatcaatagcattaatacaatgatgactgcgctggtcacggtgagcggactgcctttcagcatccataccagttttgcaccgttaaatcgcgtttgtttttgtgggcgtacggcggacgtttcctcgcttagcatcattcaccacctccacgtccgatacgcggatcaatccacaaatagagcaaatccaccaccaggttgaccagcacataagcaaaactaaccacgacggcaaagcccatcactgccgggaagtcgagcgcctgtatacttgttactacccatgcacccattccgggccaggcaaaaacggtttcggtgagcactgcgccatacaacaaatcgcccagcgccaaacccaatacggtaatgcttgggatcaacgcattgggtagcgcataacataaaacgatataccagccgggcaagccgctggcccgggcggtacgaatgtagtcttcactcaattgttccagcatcgcactgcggatctggcgagcgacaattcccaggtgaacgaacgccagcgttaatgccggtaagatgagatgttgcaacgcattgaagaagacttcaccgttgccttcaagcagcgcatcgagcagataaaagccggtaacgtgcgttggtggatccagccagtcatcaagccttccgccgccgggaagaatttgcagatgaccataaaacagcacaatgacgcccagcccaagccagaacgcaggtgtggagattccggtaatggccattattcgcaccagatgatccagccagcgatttcgccagactgcagagagtatgcccagcgggatgccaatcaggagtgccagcagcagggcaccaaaagccagctccagcgtcgccgggaaaaatatacgcaactcttccagcaccggacgcccggtacgaatggatgttcccaggtcaccatgaaacaggtcgctgacgtagcggtaaaactgtacatacagtggctggtccagtcccagttgctggcgaatattttccacgatagcatcgctggcgcggtcacccgccagtaaccgcgccggatcaccagggatcagatggctgataataaacgtaatcacgcagacgcccgccaccacgagcaccagcccccagcagcgttggcgtaaaatactccagaaggtcacgttatttactcatggtattgatattgaagacctgttccagcatgggattgaacacaaagcctttcacctctttgttcatcgccagttggtagtttttctggaacaggtacacataagcagcgtcatcaatgacgattttctgtgcctgctggtagtcccgggtacgctgcgtctggtcggtggtcgcaagcgcattgcgcagtaacttatcgacctcactgttttcatagaagctgcggttacccggcagaccttttttgtcactctcaaaccagtaattcataaacatatacgggtcggcaaaatccggactccagttgccaatcgcaatgtcgtaatcacctttacccactctgtcgcgcatggtggcgttcgccagcttttccagcttcacaatgatgcccagcttgttgagactggattgtgtcgccagagcaataggctcccagttcggatcgttatcggagtagagaaacgtcaggctggtgggtttgctcgtcactttatcccattcggctttggctttcgtttcgtcatggttgtattgcattgccgtcgcatcgtagccccacatgccttccggaatcgggccgcgcatctgttttccgttaccactcagaatgccgttaaccatgccctgataatcggtagaccaggaaatggcccgacgcagatccgcctgattaagaggcgctttgctgttattcagatacagataggtaacgcgcagactcggatactctgccacattgactttattttcctgcttcagggcgttgagttgatccaccggcagcgcatcggcaatgtcaatgtcgccacgggagagctgcaggcgacgggaggcactttcaccaataatttttacgcttacccgtttgaagttcggtttattgcctgggtaatgcggatttggcaccagaactaattgctgacctttttgccagcttttcagcataaatggtccggaaccggcggtattttgcgcgaggaagccgcgagcatcatccgctgcatgttcctttaagaccgccggattgataatggatgcaccgtcattcgccagcgtgtagaggaacggtgcgaatggttggctaagggtaaacttcaccgtatgttcgtcgggagcatcaatctttaaatctttgggaaatgcttctgctggcccctggccgatttttagtagccgctcaaaagaaagttttactgcttcggcagtgacaggtgtgccatcggcaaatttagcattatctttcagggtgaacgtccactctttttgatcgtcagacgctttccagctacttgccagatcgccttcaacgtcggtactgcctttatcaccgtccgttttgtactgaaccagccgctgataagacgggtaggtcactgtccagtcgttattatctattgttaccgccgggtcgagggtttgtggatcggcggccttaccaatcaccagcatatcttttggtacggcggcgtgcgcaaccgggaaatttgtggcaaggacgagcgcgagcaatgtgggacgaaagcttatgcttctcttcatgacagtttcctgattaactgacgtgctgtgtgccaggggatataaaacaagagaattgatcagcgagcagagggtaactcgctgcctggggtaattcgaagtgccaccattcgctggagataccgacaaaaccgccaccagtcattatcgcattcagcaacagccgattgcgctgagcggcgggcgggacggaagggtgataggcatgggagcgctcgtgcatttcatcgaaccctgcgcccatatcgaggatgttcccgtgctcatcacgaagcgtcaggtcgatcgccgtgccacggctgtgattagaaccgaccgtcacatcaacaacatattgcgggtctgggcaggcttgccacaacatcgcctgtgcttgttgtgggcgatacgcatcgtaaatcaccagttgtaacccactcagctgggcgatgctgatacttttcgccagcgcggtaatcgcatccttgtgtaacagacaacgcgcttgctgataaatagctttacctgtgatgttatcagcgcaggcgtatttcaattcgatctccagatcagggaagattacggctaaatcaaccagttcggtggtatcgctcataaacggttcctgtataagacaaaaattgctgcgctttccgcttatgcagatctcatgccatgccgggataagcgccagaatgctggcttaaagttatattttttaacttttgatcaacatttgtgcagcgtagtgcagttttggtgcaagaggggaagttaaggaaggaatctcccggaatcgtagctgaaatcacagtatttaagtgacagtgtcacgttaaatgaaaacccgcgagtgcgggcgagaggaatttgtcagattttcagcggtaacacgctgctcatccagcctggaatttcttcggcgggtagggggcgggaaaagaaatatccctgaataacgcgacagtggatcttgcgtagcatctcaaattgctctttggtttcgacgccttccgccacgacggttaaattgaggctttgcccaatgctggtaatggcttcaagtaaggcaaggatgcgtttttcggtcagacaacgatcgacaaaacttttgtcaattttgatttccgttaccggaagactgactaagcgggataatccggaaaagcccgtaccaaaatcatctacgcttaagcccacgcccatatcacgcaggatctgaatgcgcttaaagatttcggtatcgtgttccatcatcatgctttccgtgatttctaccgtcagctggtggccgtcaataccccaggcgtgcattgcatcagacacctgattaggcagttgattactgcgaaagtgcagcgcgctcaagttcacggataacgccgggatatgaatattctggctacgccattctgctaactgacggcaagcttccgcgatgacccagcgcccaatattttcgatttcaccaatctcttctgcgagaggaataaaccgactagggggcacatgaccatgcaggggatcgtgccagcgagcaagggcttcgatgccgtacagttcacccgtttctgcgaagatttgcggctggtaaaccagtttcagttggttattgctaatcgcttctttcagcgctgcgcctaaaaccaaacgctcttttaccatttcgttcatcgccgggctgaagaactgccagccgttaccgccattcttgcgaatataatccattgcattgtgagcagtggagagcaagtaatcgcggtttttacccaggtcgtagctgatgccaatactcaaggtaagcgggaagggtttatcgtcaatcattatcggcttgctgaccacattccgtagctcatcggcgatttgggtaatgttactgacgtcgttttcgaggctcacgaggacaaactgcgtaccttcgatacgacagagatactgatccggtttgagtttttcacgaaagcgattgaccacttccagcaatgcctgatcggcccacgcatagccaaggctatcaatcacatcctgaatatggtcaacaccgatgagatacaccacgggagagacggctttgtcgaccaggtcatcgaggtaattgtgcaggttattgcgatttggcagaccggtcatcggatcaaattggatgagttgttcaatatgctgacggcttttttcctgttccagcgccagcgcggccatatgctggctgatatctgccacgcgttcgataaaggcgctggtttctgctccactgctggttttaatttgcaggatccccgcaggcgcgccatcacgctgacgaatggtcgcactccagctttgcgcattttgaatttctgcaccgtgggaagaactcgcccagtgtatcggcatcccgttgcgcagtgcgaacaggctaacatggctttcgttgagtacagattcgatgttacgacaaatgatttcccccatttcatgaaatggcgggctgctgcacatggcggcgagaatattgccttcaagctggcgaatctgccgttcttcggtgatatcgctgaaagtcattaccaggttctgcagatgcgcgagcacgtcataaaccgggctgatagaggctttaatccagattttttcaccggtgcgcgtcaacagcagaaattcgtcctgatcgcgggcggttttccatagcaactgttgtaaacgaatgcggttatcggcagggaattcaggaatgttcaggagtgtatcgggctgcataccgctggcttcgctaatgcagtaaccaaacatttcggtaaatgcgcgattgcactgcacaatatggcgttccggatcgaggacaatcaccggtcggtcgagatggtcaacggcaataatcaattgtcgggtctgttctttttgcgccatttctacgctggcatcccgtaccagcgccaggtaataaactttcccctcggcgctcactttgcttagcgcaaaacgggtccagattttactgccgtcttttttctccagctgcagctcccgactcatcccctcaacacgcgctttaccgccttcacggttgtgacgaatgtattcaggatgcgcaggacgcaaatcccgcggaatcagcatatcaatgttattgccaatgacttcttcacgtttgtatccccagagcttctctgcggcggggttgaaaaacatcacttcatcattttcgttaattaacaccgcacccatcatattttgctcaagggcggggaaaaaaatgccatcggcggcattatccgcatcggttagcttcatgattacctctgcatcctggcgcatttaaagactggctttccagagttcaacacggtttctacctcgtcttttggcgatatacagagcttcatcggctatttgaatgaggcgctcatagtcaggatgaccattaaacatggcggcaccgatggaaagactgagggcaatatcttcgccgtttgcggctttcagtttggttttctccacccgactgcgaatacgttctgcggtacgtaacgtttcgttttcagaagcttcagtcaaaacaatgataaattcatcgcccccgtagcggaaaacataatcactactgcggacgttgtcataaaaggcctgagagactttacgcagaatttcatcaccagtgttatggccccacgtatcgttgatctctttgaatttatcaacgtcaataatcagcacactcagcggtgtaccggtccggttggcatgggcaatttcgcgtttgaagatagtcggtaggaaacggcggttaagtaatttcgtcagtacatccataccgacttcgtggcggcttacttcttcaaacaattcacgcagcaaggtaataatttggcttacggtatttcttatctgtaataaaaatttcacccgcagacttctgttattcaaatttctggtgttacgcatggtttgattgaaaataccgtcgaaatcctgaatcagacgggagatatggcctacttcggcaataccactaaaataatgtcgacctttatggttaaaccacaggccaaaatcagcctggcttaaaggcaaactactgcctaaatcagaatccagcaggattttatagataatatctatttcccaactaagtatactggctatttgccgttctttttcttcttcggcgttttccagtaagctgaagatacgatagttttcatcttccttactggcactactgtcactaaaggtaaacgcgcgagtcatcacttccatcgcgatatcaatactgttaatgctgaaatggtagacctgaagtttttctgcggcggaataatcgctagagaagatcaccggatagaggatttttttcagcacccgaaaccccatctcgacaatttctaccggaattcctatgcgggcatgcacttccgcgacggtatgctggatttgtattagcctttcgacatcgtcaacctgggcagaaagcacgttaataatccagcgttccatcgcactcttcaactgccgctcaacttgttcattactcaagaattcttcggcatgcgggtcgatgcggacaattcgataaaactcgatactcagataatgagcatgcgcaacggcaatttccgcggctttagcacgaatgggcggatctgcctgttcgacaagtccggtccactcatctttcattcttttaaaatacatctccataattcacacccttataaggctgggaaatcagacggaatcaaaatgaaacgcaacgtgcgagatcgactaactgcaccatattctcctgaaatatgaagatatactgaaaagaaataagcgatttaggacagtttcaatctacgctactgttcttcagaagagtatagcccatcgtaattatttttcggtgacagcgaatatcgtatggtttttcatattcatacatttttattagggatttatggctgtttaactaagtgtggttaatttgacttaagtaagcatgattattagtgggatagtttaagagggtaacaagccggtgggtaaagcaccggcttgttacaaagtaagaatgggagtttaactgccccagcgactttgcagatagctgaccgcttgttgagtctgcggtttattcagatagtcctcacggaacaagatggtgccgctaatttcgggcacagcatcgttaagatcgagctgctttttcagttccggtacgccgccgttaatcatccagtctggctctatcttactaggttcacccactttatagaaggcgataccgatatacaggcgggtcctggtcggtttaacgacatccgcccaccattttgccaacacgtcataacgcgcggcactccgactgaacggccagtaaatttggggagcaatgtaatccagcaatccttgttccacccatcgacgggtgtcagcgtaggattcgtcataggctgccgcgcctcgggtatcggaaccgagcggatcgtgacttcggttacgccacacgcctgccgggctaacaccaaattcgactcccggcttaatgcttttaatggtgtggcttacctttgcaattaactgctgagtattgttgcgccgccagtctgctttactcgcaaatgcgcctccgtatttacggtacgtttcgttatcatttagccgactacccggactctccgtatagaaatagtcgtcaaactgcacgccatctacgggatagcgggaaaccacttctgcgactatacttgtgatccagtcctgaacctcagggatgcccgggtcgaggacaaagcgatcgccagacgttctgatccagtcgcggtgttgcacatagacgctcgccggttgttgagacagagtgctattcagttccctgatagtaccgggcttcgtattaacgcttacgcgataggggttaaaccaggcgtgtactttcatcccacgcttgtgggcttcgtcgagcataaattgcagcggatcgtaacccggattttcaccaatcttaccggtcataagatcggaccacggcaaaattttgcttggccacagggcggtaccgtccggcttgacctggaaaaagaccgtgtttatgccgagacgttgcagatgatccagtttgtcgatcatcgcctgttgttgtacacgggcccggctggtggggttactaatgttaacgctggaaaccggtggccagtcgagccgagaaaccgtggccagccagatgccacgcatcggttgactgctttgttgcgtcgtggctggtggcttactacctgctggtggtgtcaccatggactctggaggcgtgcttttacaactacacagtaaaagtgccagtgcaactagtatcgctggtcttctaatcgttaatttcttgtttcgggagcagatatccatatgtgctggtttccggtaaacagatgtgcgctcattctcgtacttatccccgttaagtcaatacgacagcaagcacgaaaaagggagcgatgaattatcgctcccttgtcttataaccattcagacatggttagtgtttcttgtcattcatcacaatatagtgtggactacgtgcacgcgggtgcaggaagaagtgaccttttggtgcgttctgactgttgattggctccagagtgacgccggtatttgctttgcctttacgatcatgaacagcatagagaataaagggcagggcaagtaccaccaggaaactaacaaccagtaattcaacatacatatcggtagaatcaccctggatgttatccggcggcaggaaggaaacaataaacgccataatactagtcagcagaccgacaattgccacgaccagtttcacccctttaccaccagggatattaaatgtgcgttttaagtcaggatgtttaagaaccaacacaatgtagccaataaacagcatgaaataagcacacagataaatcaccaccgtcagcgccagtgcgatcaggaaggacatgttgttaccgccaccggtattggtgaggatgatcaacgcgatagacgtaatcaccagctggctaatgaccagcgttaccggtacgccatttttgttcattttagcgaatgccgctggcagcaggtttttctgcgctgttacatacatcccgcgagaaggaccaacaatccaggaggcgatttccgccagaacacccagcaacagcagtgcggagatcacgcgaaccgtccactcaatttctggtgccacatgggacatcagaacggtaaaggtttgcattacccctgcggagaggttgatttcattacccggaatgaccatcgcaatagacaaaccaccaacagagcttaagcagattgccgccaccatcagcagtaacatagccaacggatagtcgcgccctgggttgctcatttcattgacgtgggttgcggatgcttctacgcccatataactcaaaatgaaggcaacaaatactaccagggtgcccactttagagaagtcagggaagaaggtcttgctatccatttcgatagcaacgggggcaccggagtgcagataaatagccgctaatgcgatcaaaataaatgcaggtaacaggataccggcgaagaagccaactttagcaattcgcgccgtgtatttcgtgccaccaaactgcgttaatgccagcgcccaaagaatgatgagtgctgcaatagttttggtaatggggtcttcattcagcgctggccatttcaggatgtaggagagtgcccctaacacgaaatagagcatcggaataaaaccaatggcgatttgcagatagccaaaactgatcgctgcaaatccccatctcggccccagagtattacttacccaggcgaagacaccaccttcttcccagccgtcgacggtggccatttccgcagcacaaagtcccacgggaataaaccataaaatcccgcctaatagcaggaagaagactaaactaaagccgcttgttgcgaaggtagggtattcataaacagccattaccatgcttgccgttatggcaaagaatccaagtaatgtgagctgcttagctttacctgtctgtacacttgtagccatattatccccctaaaacggtattcctgtcggaaccgcacctgttttgttctgaagcgtattcagaacaatattttccgttgctaatgccagtgaacagactttggaaattgtcccgaaacgggttcgtttcgggacaccgttaccgttaaacgttatcaggtatgtttaaagctgttctgttgggcaataccctgcagtttcgggtgatcgctgagatatttcagggaggctttgtagtcttccagcaacagttcagcaaagtccatttcgaagccgcgacgacacataatgcgcatcaccacgatgtcggtggcttcaccgccgagagtgaaggccggaacctgccagccgcgcagacgcagacgttcagagaggtcatacagggtgtatcccggatcttcaccatctttcagtttgaagcaaaccgccgggatgccttcgtccgggcgacccgtacagatgaactcatacggccccagtttggcgatttcatccgccagataagcggcaacctggtaagaggcgttctgtactttggtatagccttcacgaccgaggcgcaggaattcatagtactgtgcaattacctgacccgccgggcgggagaagttgatggcaaaagtaccaatttgaccacccaggtagtcaacgttgaacaccagttcctgcggcagcgcttcttcgtcacgccagataacccagccgcagcccagcggagccagaccgaatttatggccactagcactgatgcttttcacacgcggcaggcggaagtcccagacgatatccggggcgacgaacggtgccaggaagccaccgctggcagcgtcgatgtgcatgtcgatgtcgataccggtatcggcctggaatttatccagcgcatcgtgcagcggttgtgggaactcatagttaccagtgtaggtcacgccgaaagtcggcaccacgccgatggtgttttcgtcacaggcttcaatcatgcgtttcgggtccataaacaactgaccggggcgcatagggatctcacgcagctccacatcccagtagcgggcgaatttatgccagcagatttgtaccggaccgcacaccaggtttggtttatccgttggtttgcctgcagcttccatacgcttgcgccaacgccatttcatcgccatcccgccgagcatacaggcctcggaagaaccaatggtgttggtgccaacggcctgaccatttttcggcgcaggcgcatgccacagatcggcaaccatatttacgcaacgcaggtcgatggctgcggattgcggatattcttctttgtcgatccagtttttgttaatggataaatccatcaatttgtggacattttcgtcgtcccaggtctggcagaaagtggccaggttctgacgagcgttgccatcaagatataattcgtcattgataatctggaatgcgacatcgtcgcgcatttcgtgcagcggaaaacgtttactttctgcgatagtggaaatagacttcgcaccaaaacgactatcgagtagttcgctccttaaatccgttacttgcttcttatccattttaaactccttaaaatgattggatcgcattaaaaaagtaggatttatcgataaagtaagcaagtgcaaaggactcgtgtttaaataacaaaatcctaatgttatttatcgtgagatattacgcgaataatattttttcattgaaaaacaatacaatatgaaattcttgggtggtggtaaggtgttttatgctgttatttttatgcgcattctgtgtctcctgaattatcacgtaaaaatcagaccttaaaatatcactattagtacttgattattattttgaacgcatttataaaattattacataaaaatagcgaatattgctaaaatccccgccaacgatgtgttgacggggctgttattattttggcaataatactccggtataagtatttaccggatgagaaagatattgtttaacggcagtgttaacattctctaccgtcatttgtttcaacaattgctcctgctcagtccatgctgcaggatcgtcatattgaataagactatttacaatagtgttcgctaattgttgaacgctacgctgttggatatcgaggctgcgctgaacgttttgctggtattcattcagttcttgctcactgatccctttagccagacgcttaaccatcacttcattcgctaacgttaacagttcatcatgtcgttctggttgacaagtaaaagccagcaaatgactgatatctttggcctgaggatcaacgctgaggcgagaagaaacgctgtatgctccagatgcctgttcacgaatattaacacgtagatcttttgccagtgcgacgttaaaagcatcgagcgccatacgcgtcggcagattaacaggtgtccgggaatcataacgcttccactgactaacctgtgccacaggttcattttgttcttttacagtaacgcttgcgttgtccgtcgcgcgagttaatggtttacctgcggctaatgggctatcagagtgtttgatacttcctaagtaacgcgtaattaacgccacgagtttgtcttctgcgacattaccgacaatgacaaacgtgatatccgctggagaactaaacaattggcgatcggcagccagcgcatctgcggcagtaaactgtgcaatctgattttcttgcagtaatttcgtgcggtcatcagcatagcgcgtctcatacatctgctgggcgaatttctccgctggacgctggtcgagcgttttcaacgcctgaatttgagcattttgtaggcttgcccaaatattatcgttaatcgtgctgtgggtgattcgctggttaatcaactgaaaaccaggttcagggttattagtccgcgcgctaacggagagcaacgtattcatgccactgactttactgctcatggttacgctattttccgcactccagcgtttcaggctggaagaggagagttcgccaacgccgcttccgctaactgctttatttgccagcgcgataagacttttttgctgcgcagggaaacttaaatcgcctttattgcttacggcaataatttgtagcttttgctcttcacccgcggattttgccagaataaccctggcaccattggaaagtgttaaacttgtcagattctccgccagcgtttctttgctgctaatttccgcctgtgggtctgcgtctactgttaagcttaaatttctgcctgggaagacgtaagccgccagctttttgttggcgtactccttttccagcgccaggatagccgcaggagacaatgcttttttggcggcaacctcattgtttaccatttgctcccaaaatgcgtcctggttctttcttaactgctgccatttttccgccagactttgcacggtaatttgctgccacagacgtttgctaagttgatatgtctcttccgggctcaagaacggcgtattatttaaactgctggatgccaggcgactggtcagcatacgtaaatcacgttcagcttgctgatcaaccgcatttttcagccaggtgaggcgggtagatttgacatcatcgagttcttcagcagaaaaaccatgctgatcaatggttgccaactctgccattaatgcattcgcagcatcctgcatattatcgtctcgtgcatttacacggaaaaacaggctctgataatcgggtgcaattttaacgctgcgcgcagtgccgccagaaatagtcttcaactcgccgctctgtatgcgttcctgcagacgttgattgaacagctgaactaacatgctccattcagcttgttcgataaagctttgctcatcgttcacttgtaccattggcaggcgataatagagtgcgatgccgttcacccggttttctttatcattaatgatattaaagcgcaggtggttttcggcttttgtcggccagacgcgattttcagctgctttgttagccggaagcttacttaaattatcctttatcagcgccagcgcttctttactgtcgatatcgccgaccacgataaaggtcatattatttggttgataccagcgttgataaaattggcgcaattgtgccggtgtgaccgtggcgacagtatccatcaggccgataggttcacggtctaaattacgggtatttgccagcaggaaagggcggcgcgcctgagaggtgcgccatttcgcatcctgatgggcacgccattcctcagtaattacgccacgttcagcgtctacttcgagtttttcaaaggttgcggcattactccattcactgaagattgccatcacttgttgcagattttgtttctgcgtagtcggcaaactcacctgatacaccgtttcgtcatagctggtataggcattaacatcgcgaccaaaacgcaggcccatactctcaaatgtttcgatgactttattacccggccatgtttttgtgccgttaaacatcatatgttctacaaaatgagccacgccgagctcattgtcttcttcctgcaaactaccggtatgaatttgcagccataaatttacctgatcctttggatgagcatgcggataaatcatatatcgcaagccattgtccagttgcccggtaattaacttttcatcctgcggtaaggcggcggcaatcagccgcccggggagcaacagagttgccactaacgtcagtaagaaacagaggtttctcataattatctccatgcgaaaaccgggcgaatttacccggttaagtaaaatccgaactattaaaatttcatgctgacatcaagccagaaagtacggccactggcgtaggtcgccacaccggtgttcgttgtatcaacagcggttttgctatccagtacattgagaatatcggcactgatcgtcaggttttgttgttgcagaaattgtggcgtccaggacaagcgggtgtcccaggtcaggctgctatccagtttttcgtcaacatactgcttgtaatcactatattcgctgatgtattgcgcatttgtcttaccaaggataatgcgagctttacgcgcttcttgccaggccagcgtattcgcccacactaacccgctcggttgatgcgtgaaatccatgtttaaggagatctttaatgggttattaaaatctgccactggaacgctatcgtaagagaccagattaccgttataaaccacctggttatcaccggtattgctctcctcataaccattgtttaagctcaagttgcccttgctcttgatatagctaaagacaatttgtgggttaatatctacctggcggatatgcaggggttcggccagttcaaaactgaggctgaagctatgcgttttggttttgccatcgttgttatattcagtaatggtggttttagtcgcgctgtcggtacgactgcttttgctgatttgatcatgcgcttcacggtaaacatagtttgcacgcgcaataacgttcttaccgattttctgctgcaatcccattgccagttcatcgttataaggcgttttcaaatcctgataacgcgtcagagttttattaccacttacgctttccgtccagctattgcggatatcacgtaatcccatatcaagaatattcccgccatagtaacggttataacctgctgtaatcatactggtttgattagcaaaaatatcccattccgtcataaagcgcggggagatattgtggttactcagatagttgtcatagtcataccgcacgccgggcattaaactcacattacgccagctaatgcgatccgccatatacagcgtgtagttgtcaattcccaggcggcctttacctttatggtaaatggtatggttagttttctttccggcagcattaatcacataggattcagactggttatggcgttcagtccacgcatcggaatagatgtattccgcgccgaagtagggttgatggctaacattacccacggcgaatttttgccagtccaggcgtgttttgaaggtgtaattatctacagcctgggaaatgtgtcctaatccgccacgggtgcaacgccctgtaatatcaccatatgtacaactaagttcggtgtaccagatgtcatgatcgtgacgggtataatcactaatatgatcccaaccaacggtggtacgcagtttggcccatgcgagctgcgtatccatatcccatgccagaccataggatttattacccatttcgcgatcagactgcgggaaggtgctggtattataatcacggctggagccggtatattttaaggttaaatcgtgggtaaagcggtcgctggcaaaccaggtaaatttgcttaatgcagtatcgataacgtttttatactgtgcccgaccggcgacaatgccgtcattgctaacataatccgcgcgggtgatatcagactggcggcggcttaaaccggcggtaacgccgaagttatcagcgagttcctgattaaagctcaaggtataaaagttctttttaaaatctggggagtaataagtacttccactagagccttgattaaatgcgctcttgttattctcatcgatatggcttgttaaccagtcgctacgcgtagtgcgataacccaatttcaccttgctatcatcagcgttgaagcgtttgatctttgcatcaattaccccgccattgaagcgaccaaattcaaccggcacaaaactgtcataaagcgtcacattgtccagtaagctgacatcaagataatacccctgactcatcccgctaatattggttgcactactggcatcggactcattcgctgggttcaggttattagttgcactaataccgtcaatcaaataggcattctggtaggggctcgcaccgtgaatagagattttctcagggcgaatatctccctggttcaagctggtactttgcgtactatccatgcgtaccgcagggttggttctcagcagatcgctgatattgccattcccggtcggtaaacgctcgatgctttcactggtgtaatgcgtgttgccgtttacgggtacagggacaggagcatagaccgtcatctcttcaaaaaaatgcatgtacatgtttttgtcatcgacggcctgcgccacatcagcgccacataaaatgacgccaggaataagaactcgcttcatttatttatatctccgtacagcagggcttttattgtttttataaaaccgcgctaatgtcacaaatatcatcggccaggttccagacaccgggttgatgtgtaaccataatgacgccgcttgtgggtagtttttcacgcactaaacgcagtaagcggatagcctcttgttcctcaagatgagaggtagtttcgtcaagaaatatccatttcggacgtcgtaaaattaatcgtgccagggcgatacgttgtttttcgccgctggaaagaatatctccccagcgatcgtggtcatgaatacgcgcagccaatttcccaagaccaacctgatgcagtacttcgctcaagcttttatcgtctacgggcaggggaagtgctttacaaataatctctttcagtaagccggttttgattaacggtgtttgactcacataccaactgtcagcaggagaagaaatatcacctttaaaccacggccagcagtgggataatgttttaagcagtgtggtttttcccgcgccagagtagcctttcagtaatagccatttgcctgggctaacatgaaagttcaggttctctaatatgatcttattatcaggcgtacgaatactcgcatcagccacttgtaccgcatgttggcaatttttaggcttattcgtagggcgctgttcagtgagttgatggaactcatacaagcgatcgataaccgcagccagttcagcaagttcgtcatatttataaataaaccagcttaaattgttgcttaccagcataaatgcctggcggcttttcatcagtccgcccagattgatctgcccgctaataaactgcggcaataacagaaagtagggaagaacgctaaggctgcggctataaatattctgccagtaatcaagccaccgctgacgattcattaaacgatgccagttctctttaatggtatgaaaattgtcgctcaactcctggcgttgtagagactcagcattgcttagcgcaatcagttctgcctgcttattatgctgcacaagatttgttcgaaatgtcgcttcgctacgttgtttttccacattaagcggacgaatacgtttacccaccttatgggtaaataaagttccaccgatcacaatgagcacgacggtatagaccatatacccctggatattccattctgttccaccaacagtgaaactgagcgtacccgcgctttcccaaagaataacggtaaaggtgatcagcatgctaagactctggatgaagccaaaactaagactgagcgttttgctgatcagtaagagaatgtcttcagcgatacgttggtcagggttatctgtatttttatgctcgccgtagatctgcgtgaagtagtagtttttatctgcaaaccaccgattaaggtagtaatctgttaaccattcgcgccagcgaatagtcagtagtttaattaaccatgttttgtttacggatattaatacaaagatccccagcagggcagggaaccaaaggacaagctgccaaagcttatcggtttctttctggcttagcgcattgaaaaaatcattattccagtcgtttaaccagacctgaattttaaccacgccaaggatcatggcgaggataataatgattaacaacacactagttttattattcttacgcagccaaaagggcttcaacagacagagatactttgctatcaacatacgaagcgtaatgggaatggttatcattagcgaaaattgattgtgccatccaatgattatctatggcaatgatttactgatgaaatttatttaagtatcatttaacaatatgaaatataaaggaatatttcattttcagtggttatggttatgctattgataatcaaggatattgctaatgccctgatgcataccacgtaagccaggattttcgcaagggaagatgatgatgacgaaacacccgacaggaatttatgtcgggtgccttgttaaggtcataagaaggaggctaagaatggagttaaaagagagcgttattaattattctccatttgttttgcaacatccataatgtggtaaagcggtactctgttcttagctaactctaccatggcgttcatataaggtaccatggtactaaaaaggattttataaccttcgcaaaaataagaaacagtctcattgtttactttagtaatacgatgcttaggacaaccgccattgcagataggtttatatgcacattgctgacatttcgctggaatccgttttttttgcgctgtcagttgtacactgttcatcgttttgagttcagatttattaatgtttccaattttgtactgtggatagacaaaatggtcgcattcgtaaatgtctccattactttcaacaaccagattatccttgcaggactcctggaaaatacaactggtatgcccattccccaaaaaacggctgacaaagctttcaaactgacggatgaaaatttcacccacatcgtttttaacccattgcataaaaatggtactcataaacttgccataagccgtgggaggcacagaaaaatcaatgatacggaatgtgttctcactatgaccactgaaatcaatattcggcgtcccggtttctagcaattcgataaattgcatatgtttactgccgatagattttaaaaaatgataaacctcaagagggtaatggacattaacgttattaatgacggttaacgtattaaactctacttgataacttttcagacgctcgatggctgctatcacttttgcaaaagtaccgttaccactattactgcgtctgtaacggtcatgtaactcctgggggccatcgatgctgataccaaccagaaattcatgttctttgagaaaggcacaccattcattattcaataaaatgccattcgtttgtaatgcattaaaaatacgtttttggcctgcatagcgttgttgatagtgaataactttacggaaaaaatccaggccagccagagtgggttcaccgccttgccaggtaaaatagacctgattgccagacgctgcgatatattgtttgatgaactctttcagagtgctgtcatccatccatttttcatgagtaaactggctctctttttcaaggtaaaaacagtaatcacatttgagattacattgaaaactggagggcttggctgtaacgtgcatcgctatctcgctcaataaggcggcggaaaaatccgccgcatgaaggtttagttatttcgcttcgcttagtgctttcttgatattgttaaacttctcctgatttacctcgctaagcggtggctggctgctgtcgataaactctcttaccacgccttgcatctctttaacgacctgcggattggcggcggcaaggttatctttttgctgtagatccgtcagtttgtagagacctaactgattgttttctactgtatagacaaggctataatcgttatttctcaccgtataagagaattggcttaagtcctcagtgttggggttatgcgggtaatcgtcactctgatggcgaacaaatttgtggtaattatcccagaatggaatattttcctcgtcaaaccagtgagaataagaggttatccaggtcagatttttatgtggctcgccttgtttcttatcttgcaaccagggcagcaaggaaacgccatccagcttaaggtcttttggaatgctgatatcggctgcatcaagagctgtcgggtagaaatccattgcggaaatcagcttgtcataattaccgggttgaagttttcctttccaccacataaacattggggtgtgagtaccgccaggataggtctgactcttatagcctttttgcgccccgttcagcggcagaggaccatcgataaccgcaccattatcggaggtaaagagaataattgtattgtcatactgtccgtttttcttcagttgttcgagaatgcgttttacaccctgatcaacagaataaacggaagcgtagtagttatctgctgtttgactaccggtattaaattgcttctgatattgatccggtgcaggattatcatttggcaggtgcggagcattataagccaggtaaagcataaaaggctggtcaagtgttttggcacgatcaacaacgccaattgcctcatcggttaactgatcgctgatataaccttttgcggggacacgttcacgatttttgaacagactaggggagttgtaatatgccgttcctgcagcgtggaatcccataaagtaatcaaagccacggttttgaggttgccattcttccgcagaaaatgtggtgaagttgtcatgatagtcacgcgtttgtttatcttccggtaccggcacattactgattttactcaagtgccatttacctactgctgcagtgtaataaccatgattctggaataattcaggcaagaaagtttctgttagcggaataccatcctgagcatcggtattggaatagacaccaaagcgggcgggagctcgaccggtcattattgcggcgcgggaggggccggaaacaccgtgtgccacatagccgttagtaaaacgtacgccttcatccattaaactaaggagcgtcggcgtacttttttgtgcagcttcaatggctttatctatccctattttgtaggtatcgacaacttcacgattttccattgtttttgggtcaaaagatcccttatcaaaaggaagttgtccataaccaagatcatccatggtcagtacgataatatttggctttcctttggtactgtattctgtcggcgtaaagtcactgaaagcaacgtttgttttggttgctttcagctttacatcatctgccgcatgagcagcaaatgcagccataccagatgccagtatcaaagatatgctggtacttacgacacttttctttaatgcagacttcataaatgttcctcttcttattgtacttaattccaaagtaattttacgaagagaaataagtggatgtaagtgaagttagtcacataaagagatagcagatttagctaaaaaaagggaaaaaacagtccataaagcgttgacattactttctgttctattaagtaatttctcgccgataaacaactaatttattgatatttaataaattattgcattttactgacaaaatgcagaattgagatcataaataatcatgcaacaggttatgcaagtgcataaatatgtgatggatgtcacttatttatttcaataaatatatcgcctaaaaacaacgcggggcagggaatggctgccccatttaattcttacgcagcgtgtgtggttgactactcgttagcaaataatcaaatagctaaagcattcatcgtgttgcccgtattcatacccgtgtgactttgacaacggtactccttagaaactctcttcggactgttgccgaaatgtttgcggaacgcataaataaaataagatgtactggcataaccacattgttcggcaattttattgacactaccttctacgcgtatcaaattttttgcgtgctgcattcttgcatctaaaagaatctgactgaatgtcgtttgctcttgcttaagttttttcttcaacaggctttcactgatgtacaggcagtcacaaatatctttcagcttccatgggtgcgccggcttcatgttgacaatatttctcactttcccagaaacggatagcacaccgttagttaatagtgtaatgaaacctttgcatgcggcaaaaatagacaggcaagaaaaaagcaaaagttcactaaaattatgatgattgcgttcttcgctgttgagataagcaatcatttcattaagcaatccagtcggtacattactagcacgtaaaaacttcgcaggaacaggcaccgtcactgtctggatgttagtgcattgtagatattttttaatggtattttcagtaaatccgatctctttaaaatgccgctcataaggttcaaaatgcgtacgaacagcgttatctaccatcaggatctcgccgtcagagaaggcgtaatctttatctaaaatgttagcgttgaaggcatgatgaataaatataacagaacaaacgaggctcattttatctccttaaaacaataaagtttttatcgatacttttttaacatttcatatttataatttgctgtttgttttcagccttgcaaactattgataatgaaatgtgtaagatctcttgcaatgcgacccatttctgaaatactcagctgatcaattgccgaaaaaatggctatcaacgtaagtgtcagtaataagacaaccacaattgcagacatgatttctttatagttgtctctttgcgtgattttgtttttcactgtggtcgcatgcatttcaaatatgtttatttagcggataacgttaaaaatcgttaatcagtatgcttaatataacaggctggagaaaagaggaaataggactggtgcttcagtactgagcggagtttcttacagctgtaggcagaagtttatatcttatagtatgtagtttaatttaatccatgtgagcaaattgcgaaataatagtcaatgaggaattcttctgctgtgcggatgacagcagaagaaatgagaagaggcattaattacttggttctaattcaaccggaatacttttatagccaggaatgccacttaatggatcgtggttatcaagtgttagcatgtgattgctttctggaaaataggtcaccagactgcggtcagccatagggtaaatgaccacttttaatctatccatgcggcgactgctgcgcttaccgtctggcgtaagcgcaataagattaactctttcgccgttttttacacggcaaattttagcttgtttagcactcataaagaccacatctcgttgaccgaatacccctcgatagcgatcatccataccataaatcgtcgtgttgtactgatcgtggctgcgtactgtcgccatgaccagcttactgttaaacgcactagagggatcttctaacagccctttgctggtaatgaaattagccttaccactcggcgtcatccagcgcctttcagcagctgcatttatcaggtgaaaaccaccgggatgacggatgcgctggttatagtcggcgaactctggcagcacagcttcaatgtcattgcgaatgcgatcataatcttccaccagatactcccaggctaccacgctctggggtagtgctgcctgcgcgattcccgcgaccactgcacactcacttttcagcattacaccggcgggttttaacacgccacggctggcatgaatcatgctcatactatcctcaacggttaccgcctgcgcaccgtttttttgcatgtcaatctcgctacgtcccaggaccggcagaatatagctatgccgtgcggtcaacagatgagagcggttaagcttagtggctacgtgtaccgccaaatctaattgcgttaacggtacagcgctcgcttcccgatctggcattgccagcgcaaaattgccccccatgcagatcaatgctcgagcctgccccgtacatattgcttgcatgctggcaattgcagcatgtccaggtgcatgaggtggggtgaagccatagcgctcacccagacgagccagaaactctgcagacggtttctcggtgataccgacggttcggtcgccctgtacattagagtgtccacgtagtgggcagatacccgcaccaggcttgccaatgttacctttcatcaacagcagattgaccagttgctgtacgttctgggtaccatgttcgtgctgagtgatccccattccgtaacagataatggtgcgttcggcagcggcatatgcgtcagccagttcggcgatttgtgtctgacttagtccagaaatacgttcgatatctttccactcggaattgagaacgtcacggcgtagctcgtcaaagccgacggtatgcgtttgaataaactcgtcatcaagcaaactaggccgacctgcggcgcttgcagcatcatcgcgctcaattaacaggcgcatcatccccttgagcaacgccatatcgccaccaatgcgcacgttatagtaggcactggccaactgagtctcagagttcgtcagcatttcaaacgggttttgcggtgcggtaaatcgctccaggccacgttcctgtagaggattgatggcgatcattttcgctccccgtttcactaaagcgcgcaagctagtcagcatgcgagggtggtttgtaccagggttatgcccaatgcaaatgactaaatcgcacttctcaaagtcttccagcaacacggtccctttacctacaccgatactcgctgccaaacccacgcttgtcggttcatggcacatgttggagcagtcgggaaagttattgctcccgtattcacgggcaaaaagctgataaagaaaggcagcttcattggaagtgcggccgctagtatagaattcaacctgattgggatcactatagctttgaaggcgtgcgccaatttcgtcgaaagcttgttgccagcttaatggcttgtaacagtcgctgacggcatcatatttcaaaggctgagtgagtcgccccgcagcctcaagctcgtggtctccccaggtaagtaaactttgaaccgtattctcagcaaagaaagaggcgtttacctgcttatccgtgacttcccaggcgattgcttttgcgccgttttcacaaatgtcgaaactcgcactgtgcttaggatctggccatgcacaacccggacagtcaaagccctctggcttattcatgtcaaacatggcaataacatcctggcgtatatccatctgcttacgtactgcattcgctacggatttaacagcaccccaaccacctgcagcaccctggtaggattcaatttttttcttcatctacttatcctgtgtggaaatgaattattaggatttgtaatagcgatgatgcacagtacatacaaagggattatcgccaacatggatatataagagtaggggactactctctttctatttttaatctattatcgttaaacaatagattaaatacgataagttaagcatcatctctcatagtgtttaaattaacatatttttcaatataaaaaataagactctggcttcaattgtgcgcggattttcttacaggtgtaggctaatagccttcacaaaataattatccgcgcaattttcgtgaatggagcgcatagactaaggtcaaaatcacaattattcatagataaaagtgacaccaatgacactctggacggttccggcactaaccttgtttcctgtttgtccataggttgcgcttaaacccagaggtactttgcttttatttactgtccccagggagacattttctcccgtagccagtatttttccattacgcattagagtgacacccactccgcttgcttttgttgcatcaggtgctgtgttagcaaacacttgtcggctactgtcagtggtggcaccgctaagataaaaactgagcttttgttcgctactgcaatatacgccaaggggtatttctgcgcttccaggaaagtccgggagatccacggtgacatttcgactatcaacggtgcagccgcctgttggcataacaacattgttattactaataatattccacgtaaaattacgcggatttccgcttcctaatgttgcaattttatacatatgaatacgggcaatgacttcccccgcttttatgacaactccaccggccgccccaactggggtaatatagagttttaacggtaatggcatcggtgtcttatcaccaatatccaatacgttggtatttgtcgtcaacgggaaggggtaggtcacattattccagtacaggcttcctttataactctgtagggagcctgcgaaagcactgccttgtaccaggtttatatgatcagtgtcgtaccagccgccgtaatcattccagcaacttatatgctgagacaagtctacaaccagattctggcccggctgtattacagggtcgagattaacataaacagaggttgtacctgctccaatactactcccgccatcgacattacaactgaaggcaaaaactttgcctgccattaatagaagataaataccgaacaggacctttatactgattgttttacccatgatatatcctaaggttaaaaattgatttaaaaagaaggctaagaaaatcgaatcgacgttattgccaggtgtagatcacattgattagcgcctcgatcgttccctggcttgcgtttccattcaccgtgatagctcttgccttaagtggaaactgtgcattacgagtgatctcatcaacaataaccgttttgctatcgccattttttaacgcagcatcctggtcatccctcagctctatctgaatattttcggcagtaccttcatttttgtaataacccgtattgtcagtactacctgtcacgattgccgtcactgcacttgtttcaaccggacaatcggttaaactcaaagtaatattgtgccagccagatgcagaaccaggttgttgcagattgcgcgtataaagatccccgagattaacgttagcttctttggtttgaatagtgcagggtttagcgactacccgaccattaacagtgatagtgacatcggcggcctggagagttgctgtgaataacgcgcaaaacgtagctaacaggaacctcttgtgaagtcttttcatatctgactctgattattgaaattcaagggtaaaggttgcgctagccctcaccagtcccggattgacggacttctgagtactcttcagacgagcggagtaaggcaaaatattgttctgttctggtaccagtgggatccactgcatcccggcatgaagatcattcagtttcaccggacgcatatttgcgtccaatatttctatacccaaaccggaggccgtattgcttccttcatccagtttcaacaaagtattattttctgcatcctcaataccgttaaatgcaacccgaacccccgttgtccctttgctgcattcacttaacgtaatctgaaaagggacggctggacttgtgctaccggtcgttggaaattgtctggcactgtttttttggagatctacggtaaaattaaggctatcgctactgactgtgcagccataatcgaggacgcgcccgctaattttaataacgctatctgcggataaagcagaataggtggttaaccccagacataaaccgaggaaaataatgttattgtatttcataatctattgttccttagcgacagattgctgtctgctggttcagtaaggtaccaggagaaacttcaggaagcttgtactcgacaatacagttactgtttttatctttgccccaactaacctgtaattgcccactctgtggaagtccagtcagataaacctgaccattttccgcgacaatgctgccatttttattctctccgtgtgtgacaattgcaccgaatggaacgctcttattaccgtacttcaacgtcattaatactttcccgccgatttgtgcattaaatgttgctctggcaatagcaccgtgagttgggatgacagtgaccacggtttcatccagttcaacattatctgcaagggaattcgcgttaagagcaacacggttttctctatattctgtcgcaaatggtaatatggcatagccacgccagtcggtatgaattccggtctggttctctattttgacattatcagcaccaggagccttaaccagaaccattgtgtcgcccagcggctgtccaaaggtgatgccatcagcatgagcaataatcccaccactcattccgtaataaatctggctgctgtcaccactccgactgtaaccgacattagtattaccataagctccacgataattaagagaactgtaaccactggtgccagagcttgtattacctccgtgggtgttaccgacctgaacgctataattcaggttattatccggcagcagagtgccataaaccccgcttagattggtcatgccgcctttcaaatcgttactcatactgtaactggcgttactattacgaaatgcgctctgactgtctgtacgcatccaatgactgaagggaacattaagcgtaaaagcgagtaaatgatcccgatcgttttgccatatattattggaatagctgtaattcaggctagtcgtaatatcaccaaacggcacatttaatccaaaacttatttgctggtcgctgcgactcgtgttccagtaactttggcgactggcactgaaaaatgtcgtaccgtaatttccaagctgctgagagatgcttatttgttcctgaccacgcttactgtagaacagattaaaataatcaataaattgtgtctgctcattggtgtctccggtaggaggcttgacggtgtaaccactcattcgactgtaggcactgtcggataagttataaaaaccttgcgtagaatagcgatatcctgcgacctggatattggttccacaacaagtttattgctgcacttgttgaagagagtatttgcaaaaacattttatgtcgctaaataacatgacgatttcattatgcatgttatttataaaccgtgactaaacagaatattattgcgaacaagggaagtgtcaggaaaggtcaagagctaccaatggttaatatggctataaatcattagctatggttaatgtttgcttgctgaaactaacaccgaattgctctaaacagataagtgcagggtttattaaagctgtccgacagactttcttaacctggtaatatctctcttgggtgactctccaaacatccgcgaatattcccgacactaatgggatagctttcgtaaccgacagcataggctgctgtggtgacatcgtaatgttcattcagcatctgtcgcctgacttcattgagacgtagccatttctgataccggagtggactcattcccgcttgatccgtccttaaataagtaacagcaccctctggtgttttcgtatgcagtgtctatgcgacagacactgcgctcttagcatggggcagggaataaccaggctatttctccatgcacaggccaattatgaaagaggagaggcttaagttcttgaaccctgaacgaataacgactaccagaaaagcacttcgcatcactcagacatgatttaacataatatacattatgcgcaccaatataaaccaaggaagaatccagtcgttggcggtcatgattgtcatgctcattaacaatgaccaaaccccatatctcacttactaccgtattctcggcttaaccgtccatgcaacctcaacacattgctttcaactgccgtcaccacgttctccggaaaatctgtcggtaaactagtcttcacgttatccagtgctgctggaatcattctggcaaagtcactcaggatttcatgcatctgcacttccgggaatctcagcacctttgctgtcgccaaaaaatgtcgcggataaattttatcgattgccgtttttttgcctttggatgcgttaagccccattgccagtttgagatcgctgatgtgtattcccgtaccgccaaggaccggaaatgcactaatgatgtcgtaaaatggcgtgagtcgataactgccgccagcctgaataaatacggagaagttttttgcatgaccgtccgttgcgccaatcaaccactggaagacctggaatttcataaaatcatagcgatctttcagcgcctcgctggaccccatcaaaaaagccatgatccgcgcgatgcctgggcctccatcactttcatatttcacgctactaggtaaaccgaatgtctgacacatatcctcctgtggcaagcgaagtaaaaccgttcgctcagcattccaacgcctgtcaaaacgttcgaccgctaacgcgcgcacatttcccgctttaatgatttctgcgtccggaacattcaacccaagttctttcgccagcagcagacagtaatactcattatcaacgctttggctgagatcgagcgtcgcattgggctgcctgatttcgccaatcggtaatttaatgatgtgcgtcgtcggcgttattcctttcggaatgcaccagtcattgcctattctgagcagtgctgtcttctcctgtgcgccagcaacgctgatgcgaaagtcattttcttctctaatcatgcctagcgggatatctgctttataagccgttaatacttcttcaagtctggcttcagtaagcttttcccatgccattatcggatgcgttacggtttcgtcttcgggtattaacgtcacggcaccaacgctgtctcgccctatttcactcaataaatcaaacggttgtctggatttggcatgataacgtttaacgatccggtcacgtacaatcgggctatcgggtaacaggttatcgaagaagttaaatacggcatcagaggtgatattccccctctgcaatggcaggctaagactcaacggtctggcataacggcttgctaaccactccggtgcatacttaaaggtgtgcgcgccgttggctaacttcgttaactcgcctacccgctggttgttcatccaagtgacaagtttaggcattaccactccagattttgctgttctgtactttctgggctggcatttttcgcgtcgcatagcgtcatactgagttcaaggctctgtaaaatcttaaaaaatgtcgtgagcgtggtattgtcagggttgttttcgaaattggaaatcgtcgcctgcttaataccaatttttttcgccagctcgctctgcgtccagccattttgctggcgaaccagtttcattgcattcgccaattgcgttgggctatagatcttctgaaagctcatcatgtcatacgtccacagcaagtttatccgcttaaggggatattataagttttatcctttagtgaggataagtcaatctggaaacacatcttatccgctctacgggataaacgctgcgatatccgcgatcgcggataaaaaggaggatttaaataaggcgttgatgcgccgtttgaagtcggcaatattaagccgcatgccatctcgacatgcggcttatacggtttaccagctatatttcactcccagcatgccctgagtatcgctatagcctttatcacctagttgcacaccgacattcccccacaggctaaggttgttatttactttcgcctcaaccccggtacgtacttcaccgagattacgcgcaccttcacggcctacggtttgaccattcatcttcacggcgtagactttgctattgttgatccagttcgcttcaatgtaaggctggaactcacgctgtttaccatcgtcacgctggtgatggctgttcaggtaggttttcaccccaagtcgcgtttgcacatttccgtcgccttccgtttcaatgcgcgttccgtctttccgggtatggtcggaatctttcacacccatccaggtgatttgcgcctgtggctggacgtaccaggtattcagcgtcccttcgctgccgctaaatgttcccgcttcaaaggtatacccaccctcaacagaggccgtcacaccgcgagaatcatagtcgtcagcagaacggttatcggaactgacgctgttatcaaaccagttatacagcgcccagctgtcaacataagcgccggtcttattcgcatcgttctgataccaggtcgcgtacagcccagcgctgtaaccgctgatgcgcccatcgcttttataacccacacgattactctgagtattactgtgctgattggcgtagcctgccatcacgccaagatgccagcgatcctgcgcgttgctactccactgcgccaaatcgccgcctagctgcaatacatagcggttagcctgagtatttagctgaccgtcaccggccctactacgttcgtgccctccgacatgacgcatccacatactgcttgcgctcccctgagaatgcagactatctgtatactgcggctcacccagacggtcgtgtaaacgatggctaaacaggctgttggctgcggcaatgttgctgatatagcttccggcctccgggcgataaacacttgggccttccggatccacaacagggggattattgatgggatcgggtgtatccgctggcgttacgccgtcccatttactggtcagataccagtttttctcgtcattccccttccctttagccagcgtgtagacgtaagccccagcttcgacagttccggtggtcagcgcgaagttacctgcagaattaccgccaacctcaatgagttcaataccgttgaccgtttgtgcaccgacgccgccaatgttatcaacccgaacgcgagtgttcccttgggtatcgcctttcacgttcatcttatcggtggggctattatcgccgcccagcgtcgcgttgaacgtcatcaggccattgtttccggtatagttgccgttaacggtcagtacattccccggtttccccccttcgctattcatttgaaccgtgccgccattctccaggttgccgccgatagtggttttagcgacacgcagtgccccccccaggcataacgttcatatcacctgcagtggtgacatttccgctcatcacaccgctgttatggatattaatgtgttgacttgccatattaatggcagagtcggaaccgaaagcaatttccccccccacgatatccgtcgtaccctgatacgccgcggaatcgttgttaagagtcaggatcccggtacccagttttgtcacatcaccgctaccgctgatactgtgcgtcatcgcccagctacgctcagtggagatggtgagcaggccattattgataacggaagcatcacccaggtttttctgctcgttgacgctgagcgcgctgcctgtatcaatgttgaattgccccacaaagcggctattatcgccatccaactctacatctgtcctggcggttgcgctcacgatacccttcccgcttatgctattacgcagttcgccagtcacgttttttagcgttaacagaccgtcattggcaatatttcctctgcctaacccctgagtattatcgaggctgacttccgcatttgggctaatgctggttaacgcattgtagcgtgcattaagcccctcgatagccagcgttccccctgtaacattcaggtttccgccacctgtcagttcaccctgactgatcccacctttatttaccgtcagcgccccctctttgaacaaaacagtgctacccatctgcccggtgaatgtctctaccgtctgcgtgcttccattaagatcgacgatggccgcgttgctgatgttcagttcccgggtgttgccaagtgcaccatccgcatcggtacgtaatgtccccatctgaacgtaggttgccccctgatagtcgttctgaccgttggaaaggctaacctgtcgcaccgtattgattgccagatccccttcaccaccgatttttgcgctcatatcggccgttgcgccataggctccgccatgttcggctaacgtcagcttttgcccaccatggatgttcagcgctttcagcccatagttaacgtacaaaccattacctggtgcggtcgtgaggcggaatccataatcaccctcggcgaccaccgttccgttttgcgcaatgtgtaacgttttgtccgcttccacctcgtcgccctgtaaatcacgtaacgttaaactgccaccgctcccaataaccgtttgcgccttcaccagttgaacgccgacatggctatcgtcgtgttccagcaaattgagcgtcgtcagagggttattcgccatgggatcattccacggtttaggcacgtcgataagcacgtcgcccgtcccgtttacctgatagttacggcctttccaggtgtagtcacccgcgccgacaaccagcgtatcgacgctgatatatccctccgcgagcgtcgcagcaggaatatccgtatcgaaaatgatggtacctccattcatggccagtccaccaatggattgctctccaacttttacgcttgtggtattttcactgtcagactgcaacatcgcgtgagtaagcgcagcggtgttgtcgcgttccagagtgaaggtactgtctttcagttgggcaacaccggcgaattcagtccctgttgcatgggtaaagccaaacatcttgtcggaggaactcagctgcactcgcatcaagccatcgcctttgagcgcattggtcagcgtgtaatctcctgcactgttcgtacttgcgagaatgtcgagcgtaccggggtttgcaatggttacttcactgctccccatgcccgttaccccatctgccgtatgagacgcaatggtcaggaggccgtcattgaccagcgttttaccgctataagtattccctgcattgaacaccgtatggcctgcatcatggatcacttttccgtctttatcgtcacctgtaatcagcatatcgacctggtagccggcatcactgttattggtatgattaaagacaaaaacgccttcgccaagaccaaactccactttcgtcgcattggtgataaatccggcatctgccgccgcctcaccgtgagcagcaccaatgtttagcgttcctacagcaggctcaaaaacacctaagtaaacttctccaccttcgacattcagcgtaccgttattcgtcagggttaacgtacccgtaccagatgtccctacgtacatattgaatgtttcaagaagagagttctgcccatccaccctcacgtcgcccttacttttgtcattgagagctatctgtgtatcacgcgctttaactatacctccggtggtaatattcagttcacccgtgcctaatacaccgacctgtagcaattgtgcgttagtagaacttgtctttaaattccagagactgtccgtactaatattaactatccccttaccggaggcatttcctccgataaatccatagcccgtactattaagggtggcaccattactgacatttacgataccgctaccaaaattaccgacattgatacccacagtatcgaagctacttgtcgcatccatcaggttcagtgtgccgataccgcttgctttatcgcccaaaaaagtaatattttggcttacgaacttaccgccatcgctaatattgaggtttccgacgcccgcaacaccaatggtggtatagacattcttattgacctcccacattccccccgtggtgatgctgacattcccgacgccggtttctccataaccgagactacttcctccgttgctgacaacaagcccctgattactgatattcatttcgccgtggccgtcataaccaagattagttccgagattagtgataacggagttcttatccttaacagtaatgttgcctgtgcctgtttctttcatccccgcagtgataattccgctatctactttgccttcactgctgacattaagttcaccgtcgccagcatcaccgatatagatatagcggaaagcttcgcccgttccgaggaaattccaatgccctttatcggtcacgttgacgacaccgtgggaaccgtcctgaacgcccaccaaactatattctttgttattaatcagtccattattggaaatattgactgtgccattaccgaaatatccattatagagtctgcgtaccgtgatgacagagtcttgatcctgcacattcagggttccgataccggtggcattgccaccgataatcgtattttcagccgtaaccaaccccccctcgcgaatagtcgcctccccagttccttgattaccaatttgaaattcaatactggaatcattattttttattagccactcgccacccttttcaacgacaacctggccattactgcccgcctgatagcctaaaatggcgacgatactactcgtgacgtaacccttatccgtaatatttaaactacctgtgccatagctacctatttcgaataattcggtcgtcagaacagagtcctctccctcaacattgaccgtcccgacgcctcctgtgctagaacctaatcttaaatagcctccatcgacgtgacccttctgtttaatattcagcgtccccgttccggattgacccacatttaaaggccttgcattatttccgctatcatacaatcgccaggtgccacccaaaacattaacggtgccctcactgtcctcattagcgccaatgacgctggtagtaatagtggttaaggaggcattaccgccagccaaaatattaagcactccagtgccataccagccaaccaggtaggcatcataagcaacatcagtatcaatattggtaatctgatcattatcaacttccagacttgcaccagacgcactaccgcttagtgccagcaaaacacccagcgtcaatctactgaatttcgttgtcagtccagaggatttacgcaaattaaccgtgcttgttttacctgccctgcgagttaattcgctgcaggcctgaaatacctgtagagtgcaattccatatcacgcgatagattctattcatataaacgctccatatacaaacaatacagccacgaaagagatgagtcgtcagacattaaaaatgaaacttattaaattgtcagaggtctgtattgagtgttagttggaggtgggaaggtgtcaatttggctaatttgctaatgctttcgaattgatagattaaaaattgcatagttcttattttatttaaatatgaactatgagttattgttgcttaataagaaaactgtttctttcaataggaaaattatcatcatcatatttaacaaagaatagcactaattgctaaaaatcgaagtttattaaaccccttttgcatccattagtgtctttaggaatattcgctataaaataagggttgtgcttaatgctttaagaaaaatagcaattttcccttgaatatcgtactggtgatggaacgatgaatctgcaagctggcttttaacaagccagctctaaaagaagggaaataagaataactatactcaaaaactaacagccacggtcatcatgatgtggctgtcaatgaaattataacccaggcgctttccataagctcgtcgtcagtccatgatcaaccagccccagctgatcctgataaactgcctgccacttatcgcgactatcctgataaagttcatgcttttccgggtctggtgtgtgcgtccgttcccagcgaaccaggcgttctccggtttctgccatactactaaaaattccggcaccgacgccagctgcaatggcacatcctaatgcagtggcttctttgaccaccggaatattgacgggtaatccgctgacatcagcgagaatttgactccataatttccctttactacctccgcctgcaaagactaagctactaggatgaatattgctgaaatcagcaatttgctgcaagttacacgcacttacaatcgccgcattttcttccagcgcacggaacaatgtcgctttgttacatttatccgggtcaatggacaagttaataaaggaaggcgcagcgtgataccaggttttaaagcgcattctgtcggagaagatcggcattacgccccagctcccaggcggcacccgactggccatctcttccagcagcgtataggtgtcgatgcctaaacgttcggcaatcagtttttcttcggcacagaaagcatcgcggaaccagcgcatggtgagtccggtaaaaaagcttatagattcagcttgtaccatgccaggaataacatgaggattaacgcgcacgttcatttctgggtctgtcaccggcgcggctaaatttacaacttgctgccagaatgtgccgccaagaaccgcggtttgtgccggacgcacaacgcctaacccaaggcaaccaagctgcacgtcgcctcctccaacgaccaccggagtgcccgccttcagaccgcagagttccgccgcttgactacttaccacgcccagcaatgtgccggtttctttgacaggagaaagaatatcggcacgtaggccagccatatccagcaatgcaggtttccagtcacgggtggttagatcaagaagtcccgtggtgccagcgttagagggatccaccgccagttcgccgctgagcatataggccagccagtcgctgatcatggtgatggtacttgcctgacggtaaatatcggaacgatggtgcgccagccaaagtaatctggggatggcacttaaagccagtgtttgtccggtcgcgcgataaacttcgttttcaaaggtattgttgtgcagttctttaagttcgctaacttcgcgtgccgctctggcatccacattggcgcaggcccagatcggggctccttcattattatataaaacaatgccttcacgcatgctacatgcgctaacggcagcgatatactccggggctatgccggcgttgtgcagcgcctggcgcatacactcacacgccagttgccagtttttgttgagatcaaattccatagaaccaggaacgtccggtactgccagatgccgccactccgcctgtcccactgctatttgattgccttccaggtcgaatatcacagcccgaatacttccggtgcctgcatccagcgccatcaggtagtacttactttcactaagggtaaagagtcgagccattagattatcctcggcttatgcgttctgtctgttcctctatacgttctccatcattcccggtaataaggtcatgcaaatttaactacgtaaaatcgccgctgctgtgtcctgatcggtaaccagtgcgttgatataaccgcctttcattgcagcggcaattgcttcggctttattttctccccctgccacgccaacccggacgggtatggtcttcagcgcgcttaaaggtaagccaatcagttcgttatgtattttgatattcgtgacaacgtcaccttttgcatcaaaaaagtagcctaaaatgtcgccaaccgccccttttcggccaatcattaactgttcgccctggctgatataaccggagcgaatgattgtcgcatcgtcctgttgactcacagcaccaatgccgacaatcgccacatccgctgcttgcgcggctaacagaacatctttgacgcaattttcattttttagcgtacgggcaatgtcagcggaggatgcccgcaacggagccggaataatattcacactgcacgccgcgttaagctgcccgattcccgtcatataagaaccgacgccaccggagagcgtgaccaggcgaatttgctgactgctaataaaaccacttaagcgttgcagcgtattcatggttgcctcgccaaaaccaatcgccagcatctgttgtggttgaagtaaactcatcaacatatgcgccgcgcctatccccagtcgcccaccgacatcagcatccgcaagcccagggatcacccggacatgttgcaggctaaactgacgacgtaattgagtttcatattccagacagccttcaaagcgagaattaatctgtacgcgaataatgccggactgatgccctttctccagcaatcggctcactttcaaacgtgtcaggccgagacgatcgctgatctcgctctgggtcagcccgtcgtgatagtaaaaccacgcgatccgcgcgacctgttcttcttcacacattccctgttcactaattgcgctatcgttgattgtcataattcattcttcactttgaacatatttaaatctttaatgcaattgttcagttcttgctcatttatatctgtgatggcaaccacagtttgactctacgagcatgaacaaacgcaaccgtgaaaatcaaaatagcataaattgtgatctattcgtcggaaatatgtgcaatgtccacctaaggttatgaacaaattaaaagcagaaatacatttgttcaaaactcacctgcaaaactgaacgggggaaatatgcaaacgagtgatacccgcgcgttaccgctactttgcgcccgcagcgtttataaacagtatagtggggtcaatgtcctgaaaggcatcgattttacgttgcatcagggggaggtccacgccctgctcggcggcaatggtgccggtaaaagcacgttaatgaagattattgccggtattacccctgctgatagcggtacgctggagattgagggcaacaactacgtcagattaacgccagttcatgctcatcagctgggtatttatctcgttccccaggaaccgctgcttttcccaagcctgagcataaaagaaaacatcctgtttgggctggcaaaaaaacagctctccatgcagaaaatgaagaacttgctggcggcgctgggctgccagtttgatctgcatagtctggcaggaagcctggatgtcgccgatcgccaaatggtggaaatcctccgcgggctgatgcgcgacagccggattctgatcctcgatgaacctaccgccagccttacccctgcggaaaccgaacgcttgtttagtcgcttgcaagagctgcttgctactggcgtgggtattgtttttatcagccataagctgccggaaattcgccagattgccgatcgaattagcgtgatgcgcgacggaaccatcgccttaagcggcaaaaccagcgaactgtctaccgacgacattattcaggccatcaccccagcggtacgggaaaaaagcctctctgccagccaaaaattatggctggagttacctggtaaccgcccacaacatgccgccggaacgccggtgctgacactggaaaatctgaccggcgaaggtttcaggaatgtcagcctgacgctcaatgccggagaaattctgggcctggctgggctggtgggggccggacgcacagaactggccgagacgctctatggtctgcgtactttgcgtggcggacgcattatgctgaatggtaaagagatcaataaattatccactggagaacgtttactgcgcggtctggtttatctgccggaagatcgccagagttccggactgaatctcgatgctagcctggcctggaacgtctgcgcccttactcataaccttcgtggattctgggcgaaaaccgcgaaagataatgccaccctggaacgttatcgtcgggcgctgaatattaaattcaaccaaccggaacaagctgcacggacattatccggtggcaaccagcaaaaaatcctcattgccaaatgcttggaagctagcccgcaagtattgattgtcgatgagccgacgcgcggcgtggatgtcagcgcccgtaatgatatctaccagctgttgcgcagcatcgccgcacaaaatgtggctgtgctgcttatctcctccgacctggaagagatcgaactgatggcagatcgtgtgtatgtgatgcatcagggcgaaattacccactctgcactgaccgagcgcgatattaatgtcgagactattatgcgcgttgccttcggcgatagtcagcgtcaggaggcgagttgctgagctaaagtcagcgtcaggaggcgtcatgctgaagtttattcagaacaaccgtgaaatcacggcactgctggcggtggtgctgctgtttgtattacccggttttctcgaccgccagtatttaagtgtgcaaacgctgaccatggtttatagcagcgcgcaaatcctgatcctgctggcaatgggcgcgacgctggtaatgcttacgcgcaatattgatgttagtgtgggtagcattaccggaatgtgcgcggtgctgttggggatgttactgaacgcaggatatagtctacctgttgcttgtgtcgcgactttactgcttggtttgctcgcgggatttttcaacggtgtcctggtcgcgtggctaaagatccctgccattgttgccacccttggcacgttagggttgtacagaggcatcatgttgctgtggactggcggcaaatggattgaagggttacccgccgaactgaaacagctctccgccccgctgctgcttggcgttagtgcaattggttggttgacgataattctggtggcatttatggcctggctgctggcaaagacggcgtttggacgcagtttttatgccacgggcgataatttacagggcgctcgtcaactgggcgttcgtactgaagccattcgcattgtggcatttagcttgaacggctgcatggcggcactggcgggaattgtgtttgctagccagattggttttatccccaaccagaccggtaccgggctggagatgaaagcaattgcagcctgcgtgctgggcggcattagtttgctcggtggttccggtgcgatcattggtgcggtactcggcgcatggttcctgacgcagatcgatagcgtactggtgctgttgcgcattccggcatggtggaatgattttatcgcgggtctggttctgctggcggtgctggtgtttgatggacgcctgcgttgtgcgctggaacgtaatctacggcggcaaaaatatgcccgctttatgacgccaccgccatccgttaaacccgctagcagtggtaaaaaacgggaggccgcataatgcgtattcgctacggttgggaactggctcttgccgcactgctcgttattgagattgtcgcatttggtgcaattaacccgcgaatgttagatctcaatatgttgctgttcagcaccagtgactttatctgcattggcattgtcgccctaccgctaacgatggtgattgtcagtggcgggatcgatattagctttggtagcaccatcggcctctgcgccattgcattgggcgtactgtttcaaagtggtgtgccgatgccgctggcgatactcctgaccttactgctcggcgcattgtgcgggctgatcaacgccggattaattatctataccaaagttaacccgctggtgattacgcttggcacgctgtatctgtttgccggaagcgctctgctgctttccggtatggccggagcgacggggtacgaaggtattggtggattcccgatggcgtttacagatttcgctaacctggatgtgctgggactccccgttccgctgattatcttcctgatatgtctcctcgttttctggctctggctgcataaaacccatgccggacgtaatgtgtttttgattgggcaaagcccgcgcgtggcgctttatagcgcgattccagttaaccgtaccttatgtgcgctctatgccatgacggggctggcgtctgcggtcgccgctgtgctgctggtaagctattttggtagtgcacgttccgatctcggtgcgagctttctgatgcccgccatcaccgccgtggtgcttggcggggccaatatttatggtggttccggttccattatcggcaccgccattgcggttttattagtgggatatttgcaacaaggtttgcaaatggcaggagtgccaaatcaggtgtccagcgccctttccggtgcgctacttatcgtcgttgtcgtaggtcgttccgttagcctgcatcgccagcaaattaaagagtggctggcgcgtcgggccaataacccattgccataaaggatatcttcatgacacttcatcgctttaagaaaatcgccttacttagcgctcttggcattgccgcaatctctatgaatgtgcaggccgcagagcgtattgcatttattcccaaactggttggcgtgggattttttaccagcggtggcaacggcgcacaacaagcgggtaaagagctgggcgttgatgtgacctacgacgggccgacagaacccagtgtttctggtcaggtacagttgattaataacttcgtcaatcaaggttataacgccattatcgtttctgcggttagccctgatggcttgtgtccggcactgaaacgcgccatgcaacgtggtgtgagagtgctgacctgggactctgatactaaaccggagtgccgctcttactacattaatcagggaacgcccgcccagttaggaggtatgttggtggatatggcggcgcgtcaggtgaataaagacaaagccaaagtcgcgtttttctacagtagccccaccgttacggaccaaaaccagtgggtgaaagaagcgaaagcgaaaatcgccaaagagcatccaggctgggaaattgtcactacgcagtttggctataacgatgccactaaaagcttacaaaccgcagaaggaatattaaaagcgtatagcgatctcgacgccattatcgcccccgatgccaacgccctgcccgctgccgcacaagccgcagaaaacttgaaaaatgacaaagtagcgattgtcggattcagtacgccaaatgtgatgcgcccgtatgtagagcgcggcacggtgaaagaatttggcctgtgggatgtggttcagcaaggcaaaattagtgtgtatgtcgcggatgcattattgaaaaaaggaagtatgaaaacgggcgacaagctggatatcaagggcgtaggtcaggttgaagtcagcccaaacagcgttcagggctatgactacgaagcggatggtaatggcatcgtactgttaccggagcgcgtgatattcaacaaagagaatatcggcaaatacgatttctgatgtgcattacttaaccggagtaagttatggcagatttagacgatattaaagatggtaaagattttcgtaccgatcaaccgcaaaaaaatatcccttttaccctgaaaggttgcggtgcgctggattggggaatgcagagtcgcttaagccggatatttaatccgaaaacgggtaaaaccgtgatgctggcttttgaccatggttattttcagggaccgactaccggacttgaacgcattgatataaatatcgccccgctgtttgaacatgccgatgtattaatgtgtacgcgcggcattttgcgcagcgtagttccccctgcgaccaataggccggtggtactgcgggcgagtggtgcgaactctattctggcggaattaagtaatgaagccgtggcgttaagcatggatgacgccgtgcgcctgaacagttgcgcggtggcggcgcaggtttatatcggcagcgaatatgaacatcagagcatcaaaaatattattcagctggttgatgccggaatgaaagtgggaatgccgaccatggccgtgactggcgtgggcaaagatatggtgcgcgatcagcgttatttcagcctcgcgactcgaatcgccgctgaaatgggggcgcaaattatcaaaacctattatgtcgaaaaaggttttgaacggattgttgccggatgtccggtacccattgttattgctggcggtaaaaaattaccggagcgcgaggcgctggaaatgtgctggcaggctatcgatcagggcgcttctggtgtggatatggggcgtaatattttccagtctgaccatccggtggcgatgatgaaagccgtacaggcggtggttcaccataacgaaacggctgatcgggcatatgaactctatctgagtgaaaaacagtaactgcggatctaaggagaagaattatgcacgtcacactggttgaaattaacgttcatgaagacaaggttgacgagtttatcgaagtttttcgccagaaccacctgggctctgtacaggaagaaggcaatttgcgcttcgatgtcttacaggacccggaagtgaatagccgcttttatatctacgaagcctataaagatgaagacgcagtggcgttccataaaaccacgccccactacaaaacctgtgtcgcgaaactggaatctttaatgaccgggccgcgtaaaaaacgtctgttcaatggtttgatgccgtgaggcgaatttatcaattttatctacaattggggtaacgcgctgacgggagtaaaaaaatgtctgactggaacccctctttatatctacacttttccgctgaacgaagccgtccggcggtggagctgcttgccagagtgccgctggaaaatgtcgaatatgttgccgatcttggctgtggcccaggtaacagcaccgcccttctacaacaacgttggcctgcggccaggataacaggcatcgacagctctccggcgatgattgctgaagcgcgcagtgctttgccagactgccagttcgtggaagcagacatccgcaactggcaaccggtacaggcactcgatctgatttttgctaatgccagtctgcaatggctgcccgaccactacgaattgtttcctcatctggtttctttacttaatccgcagggcgtgctggcagtacagatgccagataactggctggagccgacccatgtgctcatgcgcgaagttgcctgggaacaaaactacccggatcgcgggcgtgagccgttggctggcgttcatgcttactacgatattttgagcgaagccggatgtgaggtcgatatctggcgaaccacctactatcaccagatgccgagtcaccaggcgattatcgattgggtgactgccactggattacgtccgtggttacaggatctgaccgagagcgaacagcagctttttcttaagcgctaccatcagatgctggaagagcagtatccactgcaagagaacggacagatactgctggcatttccgcgtctgtttattgttgcccggcgtatggagtaaatatcacgtcagctggtaatgacgatcgggaagaatttttgctggaatttcggcttcatcgttcatctgtaacaggtcaatttcaatagcgttgcagatggcatccagtggtaaatcattgttttcagtaccgaacggatcttccagttcttccgccagacaatccaggctaataaaagtgtaggaaatcagcacagagataaaaggcgtcatgtaatgcaggtccacgaccagcgcgaacggcagcatgatacaaaacagataaacggtacgatgcaaaatcagggtgtaggcaaagggaattggcgtataggcaatgcgctcgcatcctgccaggaccgcactaatatcattaagccgatcgttgaggctaataaacaggatatcactaagctgtccattgcggcgctgaaccgccaaccattctcccattattaacaagatacggttagctggagagttgctagccagtacacgctgaagatcttcagtcttgagataatgagccagcacttccgcctgtggctgtttgcgtaatgtcatgcgtaaacagtgggcgaaagcgatttgcagccgggcaaactcccttacacttgcgctatccggcaatgtcgtttttacctcgcgcagtaagctccgactggcaatcatcaactgcccccaaagttttcgcgcttcaacgtaacgggcgtacccggcattattacgaaaaccaagaaaaatggcgatggcgacaccgagaatgctgaacggtgcgagggtgaatttgatgcccagatgcgtgtaccagggcagcatgaaaataacagcgatagaaaagagaaaattgagtagtaagcggctggatatcttggataatacactgccgtgccagacaaaaatacggcgcagccagtgttgttgtggacgaacaatcatggttatcttcaggcgtggaaaagtcgccctattaaacgtgattacgatcacattctcaagacgctacttacaaattacctacaagcttacaacattagcaggcgctgcatgtggcacctgttaatgataaaggcatataggatgttgtaactaatatggtgaaataagaaacccggtcgaaaccgggttcagaagtaacggtgttattagcacaacggacgtacagcttcgcgcatccctttttcgagaatcgcatccaggtcattagcaacctgctcgaccagaccaggcacttgcgtcaggtcctgctcccagtggtctttttctgccaaaacaatcgctaccagttcctgggtgccgataacacggtcacgatgctggctccagagttgctgataacgttccagccagtgtgcatcgtcctgtaccggatatgtttcgccgttacgctcaccacgatagaacgcaatcaatgccgctaatgcgaaagtaaggcgcgccggaagtgtgccgtttgccttctgccctgccagcagctgtggcaggatgcgggtgcggaacttggtcataccgttgagcgcgatagacagcagctgatgcttaatgtacgggttacggaaacgcccggtgactgcactggcgaaagattccagttcatcacgaggcaaatccagtaccggaataatttcttcgtagatagctttttcaacgaatgcgcaaatttcagcatcgttcatcgcttcacctacggtatccagccctgcctggaacgccaccggcaccagcgcggtgtgcgcaccgttgaggattgccactttgcgttctttgtacggtttaatatcgtcaacaatcagcacgttgagcggatatttgtccagacgcagttcagtcgctaaggatttcggtccctgaatcacaaacaggtaaaagtgttcagcggtgtcgagaaaaccatcgtgataacccagttcttcttccagtttagccacttcatcgcgcggataaccggtaacgatacggtccaccagcgtagaacagaagctgttagcctgatccagccattgaataaatgcttctggcagtgcccactcttgcgcatagcgcagcaccagttcacgcaacgcgtcgccattgtagtcaatcaactcacacggaatgatgatccaacctttatccagcgcaccgttgaaatggctaaagcgttcgaacagcagacgggtcagttttgccggatagcttaccgctggcgcgtcatcgaatttatcgcccgcatggtagctgatacccgcttcggtggtgttagagaaaacaaagcgcatttccgggttgtgcgccagtttcaggaattcatcgtattcactgtagacgctgatttcacgattaacgctgcgaatcagacgcgcgtcgctgaccgcttcccccttctcattcaggccacggataatggtggtgtacagaccatcctgcgtgctcagactcggcgggaaactagtttcaatcggacgaacaacgaccacgccagaattcagatcggtgtgctcattcaggagatcgatttgccagtcaacaaaggcgcgcaggaagttaccttcaccaaactgaatgatacgttctggatactgtgcaccgggaaaatcgcgacgatttagtgttttcacaatgggttcccttctgattagtcatacaacctgtttgaattggtacgacaggttagcaaactttaatacgccgaacccctgttttgatcaactcctgatgattaatgagcagttttatgagaaaagtgtggcgcggatcatggtttaatcgaggaaaaacgccttttcctggatcataaagtggtagaacacattgcattcaaatcgcgcgtaatgaataaagatgtcagacaacttcctcaccgtaacgcatagtgctggtacggttgcgcccatctttcttgctgcgatacagacacgtatcggcttcgaccatcaatttattaaagtcatcggtcagcgttaggtagcttgcgcgaccactaccgacgccaatacttaccgtgagataaagcgttttttgttgccaggtgaatggttgcagttcaacgcctttacggattttttccgccattagcagaccatcgacaggattcacgctcggcactgcaacagcaaattcttcgccgcccattcgcgccaccagccccttatcaccgacaatcttctgaatatgccgggcaaacacgcttaacactttatcgccacattcatgtccatagttatcgttaatgcttttgaaatagtcgatatcaagcagcatgacagtcagatgttgtgtctgtttcaggcttggacttttcagcgcctcataaagaccggaccgactgtaaacctgagtcagaaaatcaaagtcggctcgcagcgcaacttgcttcattaggctattgatcgctgccacgctaaaagaaaccataattgggcatatcgccatcgtggcaataccgagacgtgcggagaacatttgcggaatggagaacgggctaccgacgctgatatcaatcacgctatttgccaccagtacgatttccaccgcaccggtgacaaaggtcaacagacatgttacctgcggcgtatagcgcactgcacaccagattaatgcaggcagcgggaacgccagactccccgctccgccaatgactacgctggcaataacgctcacaataagcgcgatggcgggcatcatctgttctgctttaaagcgcggcagcactccaggaatagccaacgtcagcatacaaggcacgatcaacacgcccgtactgaattgctcactgaaccagtccgcaagcaaaggccagaaatccagactatcaatactgaccgaaccaagatagcatgttcgctgacagcggcggcaaataaaggtaccctgggaatgctattttgtcgttttccgcaattctcatggctgattcatctgtacaaccagccagtgatagattaccgccacgatataacgttgttgttcttcgcttaagctaacaccctgcggaatgttatgccacttagccagacaaccgcgacagcaggtcgcggtggcgtgctgagcgataaacaccggatgcccgcgcatgggggtttgcttaccgtcattagccggtaatgccggagcaagacgtttagcgacaaaatccgccgcatgttgttcgatgactggcgcgcctttctccaggcaatactgacgctctttcatgcccagacgaaagcgagagcgaaatttactacgggataaacgcgcgaagagtggatcgagagactgcattaataaacgctacgccctaactgtttcgtcaattgttcaagaacggcaatacccgcaaggctgttacctgcatcatccagttccggactccagacagcgatggccatttcatgcggaacaatcgccacaataccgccaccaacgccagatttcgccggtagccccacccgccaggcaaactcccccgcgttctggtacataccactggtcgccatcagcgcgttaatttgccgcgcctgcattggcgtcaccactggttcatcaatatgaatagctttcccctgattagccagaaagacaaacgtccgggccagctctacacagctcattttcagagcgcagtaatgaaagtagttttgcagaacggttgtcacgtcatgatggaaattgccaaagctcttcatcagccaggcgatagccgcatttcgcgcggaatgttcaaattcggaacgcgctaccaccgtatcgtaggaaatatcagacacaccgcttaagccgcgcacgacttccagcatacgttgccgtggtgcgcttaatcgcccttgcaacatatcgcagaccaccagcgcaccggcattaatgaacggattacgcggtataccctgctccatttccagttgcactaaggaattgaacggacttccagacggatctttgccgacgcgttgccagatttcctcttcggagtaatgacgcatggcgacaacgagactcagcactttggaaatagactgaatggaaaaacgttcttgcgcgtctccggcctgaaaaagctgtccgtcaacggtacagatagcaatccccaatcgggaaccgtctactgtagccagcgccggaatataatccgcgactttaccctgaccaatgagcggccgcacttgccgcaagatgttttctaaaattgcattatccatggcgactgccactttctactcctggaccgcaggtctgaaaagacctgcgagtatatcagagctgaatatgtcgcgtcagatccggtctttccacaccgtctggatattacagaattcgtgtaagccgaaatgggaaagctcacgaccaaagccactctttttcacgccaccaaaggccactcgcgcgtcgctggcacaataaccattgataaacaccccaccgcattccagacgtgccgccatctgtctggcctgtgtttcgtcagtggtaaaaatggtcgcactaaggccgaactcactatcattagccagttccagtgcatgttctgcatctttcgcaatggtgattgccgcaacggggccaaacatttcttcccgaaacgcggtcatttctggggtaacattcgccagaaccgttggcggatagtagttacctgccccagccatcttttccccgcccagtaacaaacgcgcaccctgcgccagggttttctccacctgatgatgcagctcatcacgtaaatcaaaacgagccattggtccgagagcgttctcttcgtcacggggatcgcccattttcaaggctgccgcagctgccacaaaacgttcggtaaatgcgctagcaattccctcttcgataataaagcgttttgccgctgcacatacctgtccggtattctgataacgtccggctaccgccgctttcaccgccagttccagatcggcatcgttaagcacaataaacggatcgctaccgcccagttccagtacgcattttttcagtgccgctccagcctgtgcgccaatagccgctcccgcacgaacacttccggtcaccgtgacagcagcaatgcggctgtctttaatcatctgactgacaccgtcgttgtcggcattcagccagccatatacgccttgtgggatacccgcatctttaaacacctgggcaatgagctgtgcacagcccatcacattcggcgcatgtttaagtaagtagccgttacctgcaagaatgatgggaacagcgccacgcatcacctgccataacggaaaattccacggcataatcgccagaatcgtccccaacggtcgatactcaataaccgcctgctgattttccaccagcgtaggttccgccttcagcattgccggaccatgttctgcataccagtcacacaaattcgcgcttttcgccacttcagcgcgcgcctggttgattggtttgcccatttcgcgggtgatcatttgcgccatttcttcgctacgagcgcgcagagccttaccgatatcacgcagtttttcagcacgataatctatatttgtctcgcgccagtcgcgaaagcctgctgccgccagctgaagtgcgttttcgatatcgtcagcgccagcccacggcagcacagaaagttgttcacccgtggcaggatttatgctaattgcatgagttgccggagtaatggtcatcggggtatctcctttatgagtcatggtatgaagatacgcagatttactcttgctttaaaatgaataatattaagccacttattcacgaatcgagaatgctatggatctgacccaactggagatgttcaacgcggttgccgaagctggcagcataacccaggctgcagcaaaagtgcatcgcgtgccgagcaatctcactacccgtctgcgccagctggaaacagaactgggggttgatctgtttattcgcgagaatcagcgtttacgtctctctcctgccgggcataactttttacgctatagccaacaaattctcgcgttagtggatgaagcgcggagcgttgtcgctggcgatgagccgcaaggtttattttctcttggtagcctggaaagcaccgctgcagtgcgcattccagccacgctggcggaattcaaccgtcgttatcccaaaattcagtttagtctttccaccggcccttccggcactatgctggatggtgtactggagggaaaactgaatgcggcgtttattgatggacccattaaccatactgccatcgacgggataccggtataccgcgaggaactgatgatcgtcacgccacaaggatatgcgccagtaacccgtgccagtcaggttaatggcagtaacatttatgccttccgcgccaattgtagctatcgtcgccacttcgagagctggtttcatgctgacggtgccgctccgggaactatccatgagatggagtcttatcacggaatgttggcctgtgtgatcgcaggagcaggcattgcgcttattccgcgctctatgctggaaagtatgccggggcatcaccaggttgaagcgtggccgttagctgagcaatggcgttggttaacaacctggctggtctggcgtcgtggtgcgaaaacacgtccgctcgaggcatttattcaactgctggatgtgcctgacagcgcaagacagggatatcaatgagctatttttgatagttcttgcggttaatatgctctatatagtgatgttccgatgacttatgactatatggggcaaatatggttacgccagtaagcatcagcaattacatatctcttcctgatgattttcccgtacgtaatattgcaccgcaggtaaaagaagttttaaaggattttattgatgcacttagtacaataatatgtaatgaagagtggcgcacgtctttaaacatcaacagtgccacaaaaaagatatttaataaccttgacaacttaagttatattcagaggacttcttttcggggtaacgacacgctatacaatgaaaaggttcagtttaaactcacttatcccgccaggaatggaagacacaaagaaaatattgaatttcaggtagtaataaatttaagccctatttatttagataattttcgccatgatggagaaattaatattttttgcgctcccaacccaaagcctgtcactatggggcgcgtatttcagaccggcgtcgagcgtgtactctttctgtttctgaatgattttattgaacaatttccaatgatcaaccctggtgttcccatcaaaagagcgcatacaccacatattgaacccctgcctagcgatcaccataccgctgcagattacttacgccagtttgatttgcttgtcctgaattttatctctcgcggtaattttgtcatactcccccgattatggaataactctgaggttcacagatggttcgtcaataaagatcctaacttgatcaccgccattctcgacataacggacagcgaattaaaagaggatttgttgcaaagcctgatggatagtttaggttctaacaaacatgtactacccgaagtctgcatctgctttttatcccttttagcagaacaagaatctcctcattttcagaacttgtttttatttttcgccaatatgttattgcactatcaccaatttatgaatcccaatgaaagtgatttgaatgacgtgttgatgccagcaagtttaagtgatgataaaattatcaaacatatggcgcgcaggaccctcaaactgtttgtaaaaaatgaaacaccgccaaaagttactcacgaagacctggtgaaaaacaggcctcgctcccctgtcagaccacctatacccgcaaccgccaaaacgccagacctccctgaacgtcattaaaccgtgatgttaccgactctctgacgcgtgaaagaatcagcgtcagagaaacggaaaacgcgatccagatcacaaatgcattgtattcacatcattaaccgttttaagatcatttcatcactttttcgcaactcacccgataatctgttatgacaacaaacactgtttcccgcaaagtggcgtggctacgggtcgttacgctggcagtcgccgccttcatcttcaacaccaccgaatttgtccctgttggcctgctctctgacattgcgcaaagttttcacatgcaaaccgctcaggtcggcatcatgttgaccatttacgcatgggtagtagcgctaatgagtttgccttttatgttaatgaccagtcaggttgaacggcgcaaattactgatctgcctgtttgtggtgtttattgccagccacgtactgagctttttgagctggagctttaccgttctggtgatcagtcgcattggtgtggcttttgcacatgcgattttctggagcattacggcgtctctggcgatccgtatggctccggccgggaagcgagcacaggcattgagtttaattgccaccggtacagcactggcgatggtcttaggtttacctctcgggcgcattgtgggccagtatttcggttggcgaatgaccttcttcgcgattggtattggggcgcttatcacccttttgtgcctgattaagttacttcccttactgcccagtgagcattccggtagtctgaaaagcctcccgctattgttccgccgcccggcattgatgagcatttatttgttaactgtggtggttgtcaccgcccattacacggcatacagctatatcgagccttttgtacaaaacattgcgggattcagcgccaactttgccacggcattactgttattactcggtggtgcgggcattattggcagcgtgattttcggtaaactgggtaatcagtatgcgtctgcgttggtgagtacggcgattgcgctgttgctggtgtgcctggcattgctgttacctgcggcgaacagtgaaatacacctcggggtgctgagtattttctgggggatcgcgatgatgatcatcgggcttggtatgcaggttaaagtgctggcgctggcaccagatgctaccgacgtcgcgatggcgctattctccggcatatttaatattggaatcggggcgggtgcgttggtaggtaatcaggtgagtttgcactggagtatgagcatgattggttatgtgggcgcggtgcctgcttttgccgcgttaatttggagtatcattatatttcgccgctggccagtgacactcgaagaacagacgcaataattgaaaggcccattcgggccttttttaatggtacgttttaatgatttccaggatgccgttaataataaactgcacacccatacataccagcaggaatcccatcagacgggagatcgcttcaatgccacccttgcccaccagccgcataattgcgccggagctgcgtaggcttccccacaaaataaccgccaccaggaaaaagatcagcggcggcgcaaccatcagtacccaatcagcgaaggtactactctgacgcactgtggacgcgctgctaataatcatcgctatggttcccggaccggcagtacttggcattgccagcggcacaaaggcaatattggcactgggttcatcttccagctcttcgctcttgcttttcgcctccggactatcaatcgctttctgttgcggaaagagcatccgaaaaccgataaacgcgacgattaagccgcctgcaattcgcagaccgggaatgctaatgccaaatgtatccatcaccagttgcccggcgtaatacgccaccatcatgatggcaaatacgtacacgctggccatcaagctctgacgattacgttcggcactgttcatgttgcctgccaggccaagaaataacgcgacagttgttaatgggttagctaacggcagcaacaccaccagccccaggccaattgctttaaacaaatctaacattggtggttgttatcctgtgtatctgggttatcagcgaaaagtataaggggtaaacaaggataaagtgtcactctttagctagccttgcatcgcattgaacaaaacttgaaccgatttagcaaaacgtggcatcggtcaattcattcatttgacttatacttgcctgggcaatattatcccctgcaactaattacttgccagggcaactaatgtgaaaagtaccagcgatctgttcaatgaaattattccattgggtcgcttaatccatatggttaatcagaagaaagatcgcctgcttaacgagtatctgtctccgctggatattaccgcggcacagtttaaggtgctctgctctatccgctgcgcggcgtgtattactccggttgaactgaaaaaggtattgagcgtcgacctgggagcactgacccgtatgctggatcgcctggtctgtaaaggctgggtggaaaggttgccgaacccgaatgacaagcgcggcgtactggtaaaacttaccaccggcggcgcggcaatatgtgaacaatgccatcaattagttggccaggacctgcaccaagaattaacaaaaaacctgacggcggacgaagtggcaacacttgagtatttgcttaagaaagtcctgccgtaaacaaaaaagaggtatgacgatgtccagacgcaatactgacgctattaccattcatagcattttggactggatcgaggacaacctggaaagcccactgagtctggagaaagtgagtgagcgtagcggttactccaaatggcacctgcaacggatgtttaaaaaagaaaccggtcatagtttaggccaatacatccgcagccgtaagatgacggaaatcgcgcaaaagctgaaggaaagtaacgagccgatactctatctggcagaacgatatggcttcgagagccaacaaactctgacccgaaccttcaaaaattactttgatgttccgccgcataaataccggatgaccaatatgcagggcgaaagccgctttttacatccattaaatcattacaacagctaattgaaaacgtgacaacgtcactgaggcaatcatgaaaccacttagttccgcaatagcagctgcgcttattctcttttccgcgcagggcgttgcggaacaaaccacgcagccagttgttacttcttgtgccaatgtcgtggttgttcccccaagccaggaacacccaccgtttgatttaaatcacatgggtactggcagtgataagagcgatgcgctcggcgtgccctattataatcaacacgctatgtaatttgttctggccccgacatctcggggcttattaacttcccacctttaccgctttacgccaccgcaagccaaatacattgatatacagcccggtcataatgagcaccgcacctaaaaattgcagacccgttaagcgttcatccaacaatagtgccgcacttgccagtcctactacgggcaccagtaagcttaacggtgcaacccgccaggtttcatagcgtcccagtaacgtcccccagatcccataaccaacaattgtcgccacaaacgccagatacatcagagacaagatggtggtcatatcgatagtaaccagactgtgaatcatggttgcggaaccatcgagaatcaggctggcaacaaagaagggaatgattgggattaaagcgctccagattaccaggctcatcaccgccggacgcgtactgtggctcatgatctttttattgaagatgttgccacacgcccaactaaatgctgccgccagggtcaacataaagccgagcatcgccacatgctgaccgttcagactatcttcgattaacaccagtacgccaaaaatcgctaaggcgatccccgccaattgtttgccatgcagtcgctccccgaaagtaaacgcgccaagcatgatagtaaaaaacgcctgtgcctgtaacaccaggctagccagtccagcaggcataccgaagttaatggcacaaaaaagaaaagcaaactgcgcaaaactgatggttaatccataccccagcagcaaattcagtggtactttcggtcgtgcgacaaaaaagatagccggaaaagcgaccagcataaagcgcaaaccggccagcatcagcggtggcatgttatgaagccccactttgatgaccacaaaatttagcccccatacgaccactaccagtagcgccaacaccccatcttttcggctcattctaccgcctctgaatttcatcttttgtaagcaatcaacttagctgaatttacttttctttaacagttgattcgttagtcgccggttacgacggcattaatgcgcaaataagtcgctatacttcggatttttgccatgctatttctttacatctctaaaacaaaacataacgaaacgcactgccggacagacaaatgaacttatccctacgacgctctaccagcgcccttcttgccagcagcttgttattaaccatcggacgcggcgctacgctgccatttatgaccatttacttgagtcgccagtacagcctgagtgtcgatctaatcggttatgcgatgacaattgcgctcactattggcgtcgtttttagcctcggttttggtatcctggcggataagttcgacaagaaacgctatatgttactggcaattaccgccttcgccagcggttttattgccattactttagtgaataacgtgacgctggttgtgctcttttttgccctcattaactgcgcctattctgtttttgctaccgtgctgaaagcctggtttgccgacaatcttagctccaccagcaaaacgaaaatcttcagtatcaactacaccatgctaaacattggctggaccatcggtccgccgctcggcacgctgttggtaatgcagagcatcaatctgcccttctggctggcagctatctgttccgcgtttcccatgcttttcattcaaatttgggtaaagcgcagcgagaaaatcatcgccacggaaacaggcagtgtctggagcccgaaagttttattacaagataaagcactgttgtggtttacctgctctggttttctggcttcttttgtaagcggcgcatttgctagttgcattagtcaatatgtgatggtgattgctgatggggattttgccgaaaaggtggtcgcggttgttcttccggtgaatgctgccatggtggttacgttgcaatattccgtgggccgccgacttaacccggctaacatccgcgcgctgatgacagcaggcaccctctgtttcgtcatcggtctggtcggttttattttttccggcaacagcctgctattgtggggtatgagtgctgcggtatttactgtcggtgaaatcatttatgcgccgggcgagtatatgttgattgaccatattgcgccgccagaaatgaaagccagctatttttccgcccagtctttaggctggcttggtgccgcgattaacccattagtgagtggcgtagtgctaaccagcctgccgccttccagcctgtttgtcatcttagcgttggtgatcattgctgcgtgggtgctgatgttaaaagggattcgagcaagaccgtgggggcagcccgcgctttgttgatttaagtcgaacacaataaagatttaattcagccttcgtttaggttacctctgctaatatctttctcattgagatgaaaattaaggtaagcgaggaaacacaccacaccataaacggaggcaaataatgctgggtaatatgaatgtttttatggccgtactgggaataattttattttctggttttctggccgcgtatttcagccacaaatgggatgactaatgaacggagataatccctcacctaaccggccccttgttacagttgtgtacaaggggcctgatttttatgacggcgaaaaaaaaccgccagtaaaccggcggtgaatgcttgcatggatagatttgtgttttgcttttacgctaacaggcattttcctgcactgataacgaatcgttgacacagtagcatcagttttctcaatgaatgttaaacggagcttaaactcggttaatcacattttgttcgtcaataaacatgcagcgatttcttccggtttgcttaccctcatacattgcccggtccgctcttccaatgaccacatccagaggctcttcaggaaatgcgcgactcacacctgctgtcacggtaatgttgatatgcccttcagaatgtgtgatggcatggttatcgactaactggcaaattctgacacctgcacgacatgcttcttcatcattagccgctttgacaataatgataaattcttcgcccccgtagcgataaaccgtttcgtaatcacgcgtccaactggctaagtaagttgccagggtgcgtaatactacatcgccgattaaatgcccgtaggtatcattaaccaatttaaatcggtcaatatccaacaacattaaataaagattcagaggctcagcgttgcgtaactgatgatcaaaggattcatcaagaacccgacgacccggcaatcccgtcaaaacatccatattgctacggatcgtcagcaaataaattttgtaatcggttaatgccgcagtaaaagaaagcaacccctcctgaaaggcgtcgaaatgcgcgtcctgccagtgattttcaacaatagccagcattaattcccgaccacagttatgcatatgttgatgggcagaatccattagccgaacgtaaggtaattcatcgttatcgagtggccccagatgatcaatccaccgaccaaactggcacagtccataagaatggttatccgttatttctggcttactggcatctctcgcgaccacgctgtgaaacatactcaccagccactggtagtgggcatcgatagccttattgagatttaacaagatggcatcaatttccgttgtcttcttgatcattgccactcctttttcacagttccttgtgcgcgctattctaacgagagaaaagcaaaattacgtcaatattttcatagaaatccgaagttatgagtcatctctgagataacattgtgatttaaaacaaaatcagcggataaaaaagtgtttaattctgtaaattacctctgcattatcgtaaataaaaggatgacaaatagcataacccaataccctaatggcccagtagttcaggccatcaggctaatttatttttatttctgcaaatgagtgacccgaacgacggccggcgcgcttttcttatccagactgccactaatgttgatcatctggtccggctgaacttctcgtccatcaaagacggccgcaggaataacgacattaatttcaccgctcttatcgcgaaaaacgtaacggtcctctcctttgtgagaaatcaaattaccgcgtagactaacgctagcgccatcgtgcatggtttttgcgaaatcaacggtcattttttttgcatcatcggttccgcgatagccatcttctattgcatgaggcggcggtggcgctgcatcctgttttaaaccgccctggtcatctgccaacgcataaggcatgacaagaaaacttgctaatacaatggcctgaaatttcatactaactccttaattgcgtttggtttgacttattaagtctggttgctatttttataattgccaaataagaatattgccaattgttataaggcatttaaaatcagccaactagctgtcaaatatacagagaatttaactcactaaagttaagaagattgaaaagtcttaaacatattttcagaataatcggatttatatgtttgaaaattattatattggacgagcatacagaaaaagcaaatcacctttacatataaaagcgtggacaaaaaacagtgaacattaatagagataaaattgtacaacttgtagataccgatactattgaaaacctgacatccgcgttgagtcaaagacttatcgcggatcaattacgcttaactaccgccgaaagttgcaccggcggtaagttggctagcgccctgtgtgcagctgaagatacacccaaattttacggtgcaggctttgttactttcaccgatcaggcaaagatgaaaatcctcagcgtaagccagcaatctcttgaacgatattctgcggtgagtgagaaagtggcagcagaaatggcaaccggtgccatagagcgtgcggatgctgatgtcagtattgccattaccggctacggcggaccggagggcggtgaagatggtacgccagcgggtaccgtctggtttgcgtggcatattaaaggccagaactacactgcggttatgcattttgctggcgactgcgaaacggtattagctttagcggtgaggtttgccctcgcccagctgctgcaattactgctataaccaggctggcctggcgatatctcaggccagccattggtggtgtttatatgttcaagccacgatgttgcagcatcggcataatcttaggtgccttaccgcgccattgtcgatacaggcgttccagatcttcgctgttacctctggaaaggatcgcctcgcgaaaacgcagcccattttcacgcgttaatccgccctgctcaacaaaccactgataaccatcatcggccaacatttgcgtccacagataagcgtaataacctgcagcatatccgccaccaaaaatatgggcgaaataactgctgcgatagcgtggcggtatagcaggaagatccatattttccgccaccagcgcccgcaattcaaaatcatcgacatcctgcattgcttcgttttcttccaggcaatgccagcgcatatcgagaagtgcggcgctaagcagttcgctcatctcataccctttgttgaacaggctggcattacgcattttctgttgcagttcgtcaggcattgctgccccgctctgataatgccgggcgtagcgagcgaatacctgcggatgcgttgcccagtgttcgttgatttggctcggaaattcgacaaaatcacgcggcgtgttggtgccggaaagcgtggcataacgctggcgggcaaaaaggccgtgcagcgtatgaccaaattcatggaataaggttatgacatcatcccagagtaacaacgcaggctcaccggcagcgggtttctgataattgcagacgttataaattaccggatgtgttttattaagcgtactttgctcaacaaaattgcccatccatgcaccgccgcttttactatcacgggcgaagaaatcaccgtaaaataacgccagccccacgccattatgatcaaaaatttcccacacacgaacgtcaggatggtagacaggaatatcaaaacgttcgacaaacttaataccgaagagctgattcgcggtccagaatacaccttcatttaacaccgtgtttaattcaaaatatggcttgagctgcgcctcatcaagatcaaatttctcccgccgtacctgttccgcataaaatgcccagtcccacggctgcgcgctaaacccgccctgctgcttatcgataaccgcctgtatggaggctaattcatcgctcgcacgttgacgcgccgctggaacaatttcccgcataaagttaagtgctgcttcaggtgtttttgccatctgatcggcgattttccatgcggcataatgaggaaaaccaagtagtgttgcctgttgtgcacggatctccaccagacgttgaatgatagcgcgggtatcattggcatcatttttttccgctcgcgtccagcccgcaataaacagtttttcacgcgtcgcacgatcgcgcatttcggcaagcgccggttgttgggtggtattcagcagcggaatcagccatttgttatccagacctttctcgcgagccgcctctgccgccagcgcaatctcttgctcactcattcctgccagctgcgcgatatcgttcacaaccagaccgccggatttatttgctgccagtaatcgctggttaaactggctggtcagggtcgcagcttctgtattcagtacttttaattttgctttatcagcttgcgcaagtttggctccggcaaggacaaaacgttgatgaatcacctccaccaggcggatggattcactatcaagccccagggattcacggcgctgccagacagcatctacccgcgcgaataattcaccgttcagatagatatcattagccagttccgccagttcagcggaaaactgctcgtcaagacgctgtaattcatcattggtatgcgccgcagtcatcgcaaaaaagacgctggtaacgcgggtaagtaattctccgctttgttccagtgccagaatagtattgttgaaatcaggcatttgcgggttaagcgcgatggcagcaatttctgcccgcttttgctgcattccctcatcgaatgccgggcgatagtgatgattggcaatttgatcaaaatggggagccagatacggcagtgtgctttgcacaaggaaaggattcattgttgtcattttcttctcctgaacgcgaggtgttccatagcgtaggcttactgataacggagtgcaatcttgcaatccagtattacccgctcttaagcatcccgtgctatgttattgacacacaaaagcgttgaggaacagtgagaagcgcagtgcccagccatcccgatactgctgctttcaccaaatccttagtgcttctttcgtgtttttctattgtcataatggttatctctaaaaaagaggtaagatgcgtactacttactcgccgttattggtattattcagaaaaagtgagtaagactttgcagcaatgtttttgatcctgttcaaataaactaatggcatcagcaacatgctggaaatcaaacgtatgggtaattaatttttctggtttaattaaccctttacttaaccagtcgataacgatcgggaatttatttgcatttaagcgactagagaaaatagagagttcttttccggtaattccttgctgaatcacttcagacggttcactggagaaccccatcaatacaatacgtgccgctggagaagccagcgttacggcctctttcaggatagaaggatgacaagccgcatcgataattaatgtcggcttgatgcctttttcagtgaaaatctcgccaagcggtgtctggctgttattaatcgcccagtcagccccgctctctttcgctttttccagtcgttcatcaatgcgatcggcaacaatcacatttttaacgttatagacgccttttaatacctgaacgatcgtcaggccgattggaccggcaccataaaccagaacggtatcattttcagtcggttgaccatgtccggttacgttagccgcaatggtaaaaggttcgatcattaccgcatattgatcggccactgcttcaggaattttccacgcattttttgccggaaccacggcatattcactgaaaccaccgtcagcgtgcacacctaatacagccagtgtcgtacaaacgttcggtttacctatagagcacggatagcaatgcccacagctgaccaccggatcgacagcaacacgttcaccgactctggcgctttccacgccttcacccactgcatcaatgacgccaaagaattcatgaccaatgacgcgcggatatttcgcaaaaggattatgcccacgataaatatggctatcactaccacaaattccggcaagtttcacttttactcgtacttcacccgcactcggggtgggtatttcacgttcgacaatcgccagttgattcggtttttcaattaatatgcttttcattatcttactccttaccagttccacagcgtgccatcttccagacgtgcgactggtagataagcaggttcatagggatatttcgccgccagcttttcatcgaattcgataccaagacccggtttgtctcccggatgcatatagccgttatcgaaagtccagttgtgcgggaagacttcgagcatttgttcggaataacccatgtattcctggacaccgaaattggggacccacagatcaaagtgcagcgccgcagccatgcagactggactcaaatcggaaggaccgtgactgccagtacgtacctgatacaggctagcaaaatcggcaatccggcgcataccggtaattccgcctgcatgggtcagcgtggtgcggatataatcgatgagttgctcttcaatcagttgtttgcagtcccagatgctgttgaagacttcacccactgcgatgggtgtgacggtatgttggcgaatgagacggaagcattcctggttttccgcaggcgtcgggtcttccatccagaacatgcgataatcttcaatgcttttaccaaagcgcgccgcttcaataggcgttaagcgatggtgcatgtcatgcagcaaatgttcattaaaaccaaacttgttacgtaccgcgtcaaacaatttcggcatgaaatcgaggtatttctccgtgctccacagctgctcttccggccactgtcctttggttgcgggttcataagccagacctttacctttgctcatgccgtaggtggttttcataccagggattccgcactgcacgcggatggctttgaatccaagctcttgatgacgggcataatcatccagagcttcatcaatactgtgaccggtggtatggcaataaaccatcaccccttcacgagacgcgccgccgagtaactggtaaagcggcatgttggcagctttggctttaatatcccacagcgccatatcaaccgcactaatggcgctcatcgtaaccggaccgcgacgccagtaagcacctttatagaaaaactgccagatatcttcgatacggtgcgcatcgcgaccaataagctgcggacaaaggtgatcctgcaaataagaggccacggaaagctcacgtccattgagggtggcatccccaaggcccgtaataccgtcctcagtggtgatttttaatgtgacgaaattacgccccggacaggtaacaaaaacttcagcctttacgatcttcatgttcgattccttgcatcgcttgtcgtgatgcatgaaatctacgcaactgagctactaccatacaagtataaagatcgaaaaaagccggagtgatcacaaaaaaaggcgtatatttgcgctgtgaatggttgacaaaagatgaaatagaataccttttgtcagctgacacttcctcttatcttattgataaaatggatttatgttcttacgtgcgcccccagcccgcaacaatgatcaacatgccgcaaagcgcaatcaacgcacccgtccagtcataaagagtcagtttcacgccatccacaacgcgcagccacatcaacgccgtgcagacataaacgccaccataagccgcgtaaacacgcccactcgccgctggatgcaacgttaacaaccagacaaacagcgccagactaatccccgccggaagcaacagccagatactggcgtttcgttttaaccacaaccagggcagaaagcatccaataatttcacacagcgcagtagcaaaaaatagtaacgttgttttaatcatctttgtctcttattgacatcatgtatagttatagggcgacataatatcatcaatataaacaccctcctggtacgttttgcgtccgcagtggatggtgtagaatcacctttaatcattcatacagggaatgaattatgaaaatcactctcagcaaacgaatcggcctgctcgctattctgctgccttgcgcactggcattgagcacaactgttcatgccgaaactaacaaactggtgattgagtctggcgacagtgcacaaagccgccagcacgccgctatggaaaaagagcaatggaatgacacgcgcaatctgcgccagaaagtgaataaacgcactgaaaaagagtgggataaagccgacgccgcttttgataaccgcgataaatgtgagcaaagcgccaacatcaatgcctactgggagcccaatactttgcgctgcctggaccgtcgaactggccgcgttattaccccctaacctgttattgatttaaggaatgtaaggacacgttatgccaagcgcccacagtgttaagctacgcccgctggagcgtgaagatttacgctatgtacatcaactcgacaataacgccagtgtgatgcgttactggtttgaggaaccctacgaagcctttgttgaactctctgatctgtatgataagcatattcacgatcagagcgaacggcgctttgtggtggaatgtgacggcgaaaaagccggtctggtggagctggtggaaattaaccatgttcatcgccgcgcagaatttcagataattatctccccggagtatcaggggaaaggtctggcaacccgtgccgccaaattagcaatggactatggctttaccgttctcaatctctataagctgtatctgatcgttgataaagagaatgaaaaagcgattcacatttaccgcaagcttggctttagcgttgaaggtgaattgatgcacgagttctttattaatggtcaatatcgtaatgccattcgcatgtgtatattccagcatcagtatctggcagagcacaaaacaccgggtcagactctcctgaagccgaccgcacaataacattaataataatcgatcgtatttttgatggtgtaaacccgttcgacggcgggttttactccttcatcaacaatgattagctgacagtccaccggattagcgtgactgtcatattcacagctctgttttacattaccaacccgttgattattcagtaaagtaaccgctgtgtaatctaattttttgatcggatccgtacttggcgtggcgctgacagataatgttttgtcgttacttttcgtggttttacccagcggataaccctgatcatcatagcgatattccatctgcatttgtttgctgctggctttaatcacgaagccattatcatcggtttcccaactcaccccggcagaaggtaattctgctagctggcattttccctgtaaacgtactctcttctccagcgtctcggcatcacggtaataattggcgtccagtaccagagcgaccacggtattattttccagatccagtaattcgagactatcaaaacagccttcttcgctcaaagtcccagaaacacgtttcgtcacttcaccttgctcatccattaatgtctgagtgaaatcttttaccggaccacgcagcggatcaaaatcgaattcattagagaaactggccatctcaggggtaaaactaagtgttacctctgtgcggtcacatcctgtgaggaatatcgcgagtaagcatggtagtaatttgtatttcacaacagtcaccagagagtagagatgattctcaatcatagtagcaaatacagtactttacacgttaaatgctatgcttaaagaagttatcttcgcgtaaggagcttatgatgaaactcagtacctgctgtgccgcgcttctgctcgccctcgccagtcccgcggtactcgccgcgccgggatcctgtgagcgcatacagagcgatataagtcagcgcattatcaataatggcgtacccgaaagcagcttcacgttaagtattgtacccaatgaccaggttgatcagcctgattcccaggtcgtcggccattgcgctaatgatacgcataaaattctctatacccgcaccaccagcggtaacgtctctgctcccgcgcagtctagccaggatggcgcgcctgccgaaccgcagtaacacattatcgactgaacgccggatatgacaaatccggcgatttgaacatacaacataatcccaccttattactcatacccttctattgatatggattaataattcttaacccaaaatgggtagactccctctattgttagcgcgctaaatattcaatatataaacttttatataacgataaagaacagggagtgagttatgtccaaaaatgaacgaatggtgggcatcagccgcagaacactcgttaaatctaccgcgataggttctctggcgctggctgcaggcggtttttctttgccgtttaccctgcgcaatgcagcagcagcggtacaacaggcccgcgaaaaagtggtctggggtgcctgttccgtcaactgtggtagccgctgtgcacttcgtctacatgttaaagataatgaagtgacctgggtggaaactgacaataccggcagcgatgagtacggcaaccatcaggtacgcgcctgtttgcgcggtcgctccatccgccggcgtattaatcatcccgatcgcttgaattacccaatgaaacgcgtgggcaaacgcggcgaaggcaaattcgaacggattagctgggatgaagccctggatactatcgccagtagcctgaagaaaaccgtcgaacaatatggcaatgaggctgtatatattcagtactctagcgggatcgttggcggcaatatgacccgctctagcccaagtgccagcgcggtcaaacgcctgatgaactgctacggcggtagtctcaaccagtatggctcctacagcactgcgcaaatttcctgtgccatgccctacacctacggcagtaatgatggcaacagcaccacggatattgaaaacagcaagctggtcgtgatgtttggtaacaacccggcagaaacccgcatgagcggtggtggcatcacttatcttcttgaaaaagcgcgcgagaaaagcaacgccaaaatgattgttatcgatccgcgatataccgatacggctgccggtcgtgaagacgaatggctccctattcgcccgggcaccgatgccgcgctggttgcgggtattgcctgggtattgattaacgaaaatctcgttgatcaaccttttctcgataaatactgcgtcggctatgacgaaaaaaccttacccgcagatgcacccaaaaatggtcactataaagcctatattcttggtgaaggtgacgataaaacagcgaaaacgccgcagtgggctagccaaattaccggtatcccggaggaccgtatcatcaaactggcgcgtgaaattggcacagcaaaacccgcttatatctgccagggctgggggccacaacgccaggcaaacggcgaactgactgcacgcgctattgctatgttacctattttgacgggcaatgtcggcatcagcggcggaaatagtggcgcgcgtgaaagcacctataccattaccatagaacgcctgccggtgctggataatccggtcaaaacgagtatctcctgcttcagctggacagatgctatcgatcatggtccgcaaatgacggcaatccgcgacggcgtccgcggcaaagataaactggatgtgcccattaagttcatctggaactacgcgggaaataccctcgttaatcagcattctgacatcaacaaaacgcatgaaattctgcaggacgaaagcaaatgcgaaatgattgtggtcatcgaaaactttatgaccagtagcgcaaaatatgccgacattctgctgccagacctgatgaccgttgagcaggaagatattattcctaacgactacgccggtaacatgggatatctcattttcctccagcctgtcaccagcgaaaaattcgaacgcaaaccgatttactggatcctgagtgaagtcgcgaaacgtcttggacctgacgtctatcaaaagttcacagaaggtcgcacgcaggaacaatggttacaacatctgtacgccaaaatgcttgccaaagatccggcgttaccgtcttacgacgaactgaaaaaaatgggtatctataagcgtaaagatcccaatggccattttgtcgcctacaaagcatttcgtgacgaccccgaggcaaatccacttaaaacgccttccggtaagattgaaatttattccagcaggctggcggaaattgcccgtacctgggaactggaaaaagatgaagtgataagcccattgccagtttatgccagtacctttgaaggctggaactcccctgaacgtagaaccttcccactgcaactgtttggtttccattacaaatcccgtactcacagcacctacggcaatattgatctcctgaaggctgcctgccgtcaggaggtgtggatcaaccctatagatgcgcagaaacgtgggattgccaacggcgatatggtgcgggtgtttaaccatcgtggcgaagttcggctaccagccaaagtaacaccacgtattctccctggagttagcgctatgggccagggagcctggcacgaggccaatatgtctggcgataaaatcgaccatggcggctgtgtgaatacgctaaccactctgcgccctagtccactggcgaagggaaacccgcagcacactaatctggtcgagatcgaaaaaatataacccacgacaaccataaattctggcatgacattttgtttgaaaagcaataagtgagtaatgatgaaaatccataccacagaggcgctcatgaaggctgaaatcagccgtagaagtctgatgaaaacctccgcacttggcagtcttgcgctggcaagcagtgctttcactctgccattttcccaaatggtccgggcggcagaggctccggtagaagagaaagcggtctggagttcctgcaccgttaactgcgggagccgctgtctgttacgtttgcatgtgaaagatgacaccgtgtactgggtggagtctgatacgacaggtgacgacgtctacggtaatcatcaggttcgagcgtgtttacgcgggcgctctatccgccgacggatgaatcatcctgataggttgaaatatcccatgaagcgcgtcggcaagcgcggtgaaggtaaatttgaacggataagttgggacgaagccctggataccatcagtgataatcttcggcggatcctgaaagattacggcaatgaggctgtacatgtcctgtacggaacaggcgtagatggcggaaacatcaccaacagtaacgtcccgtaccgtctgatgaactcttgcggtggttttctcagtcgctatggcagctacagtaccgcacagatcagtgccgcaatgagttatatgttcggtgccaatgatggcaacagcccggatgatatcgccaatacgaaactggtcgttatgttcggaaataacccggcagaaacgcggatgagcggcggtggtgtcacttactacgtcgagcaagcccgcgaacgtagtaacgcacgcatgatcgtcatcgatccacgttataacgacactgctgccgggcgtgaagatgaatggctgcccattcgccctggcaccgatggcgcactggcctgtgcgattgcctgggtactgattactgaaaacatggtcgatcagccatttctcgacaaatattgtgttggttacgatgaaaaaacgctgcccgccaacgcaccacgtaacgcgcattataaagcctatattctgggcgaagggcctgacggcatagctaaaacgccggaatgggcagcaaaaatcaccagcatcccggcagaaaaaattatccagttggcacgagagatcggtagtgcaaaacctgcttatatttgtcagggttgggggccacaacgacattccaacggcgagcaaacatcccgcgctattgccatgctttccgttctcaccggcaacgtcggcataaacggcggcaacagtggcgtacgcgaaggtagctgggatctgggggtagaatggttcccgatgctcgagaatcctgttaaaacgcagatttccgtctttacatggacagatgccatcgaccatggtacggaaatgaccgcgacccgtgatggtgttcgtggaaaagaaaaactggatgtccccatcaagtttttatggtgctacgccagtaacacattgatcaatcaacatggcgacatcaatcacacccatgaggtgcttcaggatgacagcaagtgcgagatgattgttggcattgaccacttcatgacggccagcgctaagtattgcgatatcctgttgcccgacctgatgccaacagagcaagaagaccttatctctcatgaatctgcagggaatatgggctatgtgatcctcgcccaacccgcaaccagtgcaaaatttgaacgcaaacccatctactggatgctgagtgaagtcgccaaacgcttaggaccagacgtttatcaaacctttactgaaggtcgcagtcagcatgaatggatcaaatatctccatgcgaaaacgaaggaacgtaaccctgagatgcccgactacgaggagatgaaaacgaccgggatctttaagaaaaaatgcccggaagaacactacgtcgctttccgcgcattccgtgaagatccacaggcaaacccgttgaaaacacctagcgggaaaatcgaaatttattctgaacgactggcgaagattgcagatacctgggaattgaaaaaagatgaaattattcatccccttcctgcgtataccccaggttttgatggctgggacgatcccctgcggaaaacctatccactgcagttaacgggcttccattacaaagcgcgtacccactccagctacggcaatattgatgtgttacagcaggcctgcccacaagaggtgtggatcaaccccattgatgctcaggcacgcggtatccgtcatggcgataccgtgcgggtatttaacaataatggagaaatgctgattgccgcaaaagtgactccgcgtattctgcctggcgttaccgccatcgggcaaggtgcgtggcttaaagcggatatgtttggtgaccgggtcgatcacggcggcagtatcaatattctgacctctcaccgccctagtccgctggcaaagggaaacccgagccacagcaatcttgtccagatcgaaaaggtttaaggagtagcccatgaccacacaatatggattttttatcgattccagccgctgtactggctgtaaaacctgcgaactggcgtgcaaagattttaaagatcttggcccggaagtcagtttccgccgtatttatgaatacgctggcggcgactggcaggaagataatggcgtctggcaccagaacgtgttcgcttattatctctccatctcctgtaaccattgcgatgaccccgcatgtacaaaagtctgccccagcggcgcaatgcataagcgtgaagatggctttgtggtggttgatgaagatgtttgtatcggctgccgctactgccacatggcttgtccgtacggcgcgccacagtacaatgctgaaaaagggcacatgacgaagtgcgatggttgttatagccgcgtcgccgaggggaaacaacccatatgtgtcgaatcctgcccgctgcgtgcacttgagttcggtccaattgaagagctgcgccagaagcacggcactcttgctgccgtcgcgccactgccgcgcgcgcatttcacaaaacccaatatcgttatcaaacctaacgccaacagccgcccgaccggcgataccactggttatctggctaatccggaggaagtgtaaaatgggaaatggatggcatgagtggccactggttatctttaccgtattgggtcaatgcgtagtaggcgcgctgattgttagcggaattggctggttcgccgccaaaaatgacgcagaccgtcagcgtattgtccgtggcatgtttttcctctggctgttgatgggcgtcgggtttattgcctctgtcatgcacctgggaagcccactgcgggcgtttaactccctgaatcgaatcggagcttctggtctgagtaacgagattgctgccggttccatattttttgccgttggcggattatggtggctggtggcagtcatcggtaaaatgccgcaagcgttggggaaactctggttacttttcagcatggcgctcggcgtcattttcgtctggatgatgacctgcgtgtatcaaatcgacaccgtgccaacctggcataacggttacactacgctggctttcttcctgacggtattgttgagcggtccaatacttgctgccgcaattctgcgggcagctcgcgttacatttaataccacaccatttgccatcattagcgttctggcgctgatcgcttgtgccggggtgattgtgctgcaaggtttgtctctggcgtctattcacagttccgtgcaacaagccagcgcactggtaccagattacgcctccttacaggtctggcgtgtggtattgttatgcgcaggtcttggatgctggctttgcccgctcattcgtcgccgtgaacctcacgttgccggacttattctggggctaatcctcatacttggcggtgagatgatcgggcgtgtgctcttttatggcctgcacatgacagtaggaatggctattgcaggttaacaaattggtgcggggcaacccgcacatttcaggatgttaggaatgacccattttagtcagcaagataatttttctgtcgcggcgcgcgtgttgggcgcgctgttttattacgctccagagagtgcggaagccgcacctctggttgcggtactcaccagtgacggctgggaaactcagtggcctctaccagaagcgagtttagcgccgctggtgacggcttttcagacacagtgtgaagagactcacgcccaggcctggcagcgtttgtttgtcggcccgtgggcactgccgtctccgccgtgggggagcgtctggctggatcgcgaatctgtgctgtttggcgatagtacattggcacttcgtcagtggatgcgcgagaaaggcattcagtttgaaatgaagcaaaacgaaccggaagatcattttggtagtctgctgttgatggctgcgtggttggcggagaatggtcgccagacagaatgcgaagaattgctggcatggcacctttttccgtggagtacacgttttcttgatgtttttatcgaaaaagcagaacaccctttctaccgtgcactgggtgaactggctcgcttaacgctggcgcaatggcaaagtcaactgttaattcctgtcgcggttaaaccgctgtttcgataagatcaccgtaatattgccggatggtgacgattacgcgcaatccggcaataataggttacagtgtcacgtttttttatctcttaaagcacgcactgcttttgcggctggcctcttttgccgcaaaatagtcgcccgtgtttcattgcccatttctgctcatgcatcatctacacatctatccggatctgcgcactatgttccaccgtctgcttatcgcaacagtcgtcggtattctcgcggcctttgccgttgccgggtttcgtcatgcgatgctgctactggagtggttgttcctcaataatgactccggcagtctggtcaatgcagcgacaaacctttccccctggcgacggttgctaactccggcgctcggcggactggcggcgggtttgttgctgatgggctggcagaaatttacccaacaacgccctcatgcgccgaccgattatatggaagcgttgcaaaccgatggacagttcgattacgcagcaagcctggttaaaagccttgcctctctgctggtagtaaccagcggcagtgcaattggtcgcgaaggtgcgatgattcttttagctgcccttgccgcctcctgttttgcccaacgttttacgccacgccaggagtggaaattatggatcgcctgtggggccgcggcgggaatggctgcggcctatcgtgccccgcttgctggcagtttatttatagccgaagtgctgtttggcactatgatgttggcctctctcggcccggtgattatttccgccgtcgtggcattgctggttagcaatctgattaatcatagcgacgcgttactctacaacgtacaactcagtgtgacggttcaggctcgtgactatgcgctgattatcagtacaggtgtgctggcaggtctgtgcggaccactgttgttaacgttaatgaacgcctgtcatcgtggatttgtgagtctcaaacttgcgccgccctggcaactggcactaggcgggttgatcgtgggtctgctttccctgttcacacctgcagtgtggggcaacggctatagcaccgtacaatcctttttaaccgccccaccactgttaatgatcattgccgggatcttcctttgtaaactgtgtgccgtgctggcgagtagcggttccggcgcacccggtggggtctttacaccgacgctatttatcggtcttgccattggcatgttgtatggtcgtagcctgggattatggttccctgatggcgaagaaattacacttttactcggattgaccgggatggcgacactgttggcggcgaccacgcacgcgccgattatgagcacgttgatgatatgtgaaatgaccggggagtatcagctactccccggtttattgattgcctgcgtaattgcgagcgtaattagccggacgttacaccgtgactctatctaccgccagcacactgcgcagcatagctaagcggatgtattgccccagttcacgctgttcggcgcgcggcagataaggcagttcaccaatgagcggtgccggaagttttttacccagcacatcaatgatttccgcataatgcgccagtcctgggttgattcggttagccacccagccaatgagcggcagcccgtcgttggcgatcgcctgagctgttagcagtgcatggttaatgcaaccttcctgaataccgacaaccatcaacaccggcagttgttcctgcactacccattcagagagtggacgcaaatcattcatcagactgcgccagccgccagtcccttctaccacgacatgatcgactttttcggtcaggtttgccaggccgttactaatgagggtgtaattgattgggcaactgtgcgccacgctactttcttcttcgcttaacgcgataggattaactgcttcataaggcagttcgatggtactaacactctgcaacaccagggcatctttattacgcagcccttcgggtgtctctttgctccccttcgctacgggtttatatcccgcaaccgtttttccctgggaggctaacgcttgtagcaatgcgcgggaaaccaccgttttccctacagaagtgtctgtaccggtaataaagaaacgcttcagcatcactaactccaccgttatgcttcacaaatataaaccaggaaaataattaaccttgaaagtctaagttatgctttcctggcccaaattgagatagcgcaaattttggtagaacagttaaaaaatgttaaccctgcaacagacgaatcaacaaagaaccgttatacatcgcgtcttttaccagtgcagcgcctgccatcgtgccctggttagaaaactgagtactctcaacgctgatgtgctgactatacgcaggaagggcctgctgacggatgctgtcactgatgaccgggaagaggatatctgccgctttacttaacggactgccaatcagtattttttgtgggttaaataaattcaccatgatggcaagaatgcgcccgacatgcgcgcccaccccggtaatgatgtcttttgccagtagatcgccgcgcaatgccgcctgacacaaactgtccacggttaacggttgtccatgtaacatgctgctcatggattgattaagacgcagctgtgccagctcaagaatactgtccacgctggcgatggtttcgaggcagccgtgattcccgcaataacagcgtttcccatacgggtcgacctgtgtgtggcctatttccacgagactactgctgcctgcgtgtagcagatgaccatcggtaatgacgcccgcccccacgttgtgatcgataaccacctgaatcacatcgcgcgccccgcgactggcaccaaacaaggcctctgccatcgtccatgcgctgatatcatgctgaatataaaccggaacgccggtatgctgctccagcgcctcgccgagcggcatctcttttacatcctcgtagaacggcatgcgatgtacaataccattttccgtatcaataattcccggcaaggttatggcaatgctagttagacgctcaagttttttctggtggcggataaaaaactgatcgatatgggaaataatacgatccagcaatggcaagtcatcttttaacgccagttcctggctctcttccaccaccagtttgctgctcagatcgcgcagagcaaggaaaatctccccgcgactaatgcgcagagaaagatagtgccaggcttcagtttcaaccaccagccccaccgccggacggccacggttccccgcttctttgatttccagctcttgcaccaggtgtgcttcgagcatctcacggacaattttagtgatactggcaggagccagttgcgccagacgggaaagatcgatacggctgactggaccaagctgatcaatcaggcgataaaccgcgcccgcgttggtctgctttatttgatcaatgtgcccaggctggttttcagcaaccaccgcatactccctatattttcgcgctccgaaataatctgtaggctatggtgaagcacttcaatacgtgtcgtcaaatttttacttaggcatgtgattaacagcacatttttcgggctttttcgctgaaatttccctcacctgagagcattcagcagatgaatacgaaagttacgcgcagccggactttgttcatgatgtttcggccagaccaaccacatttcagaaaccgcatcctcttcagcaatcggcacccagcgcatttcgttgagctgaacacgtttaaaactcgcaggcaaaatactaacacccagaccggcggaaaccagaccgatgatggtcattgcctcgcccacctcctgagtgatgacgggcgtcaaatggtaacgtcgcatcagcccgagaatatcgtcatacagccctgtcccgacgtgcggatcaaaaaagacaaagggttctttcgccagttcagccagcgttacattcgggttatttgccaggggatgatcgtgcgggatcatcgccataagcggttcatggacgatgactgcgtgttcaaggctctccggtaacgctgtgttacgcagcaatcccatatccagcgttccttcaatgagcggagcgatttgctcgcgagtgttcatttcgcgggtttgtaaatggacatcaggataatcacggcgaaacaggcttaacgtatcggacaccgcccgaataaaaggagcgctgctagtaaaaccaatgcgcaactcccccgcttcaccctgatgcagcctttcagcgcgagcggcagcgtcatccaccatagacaggatttgccgactatctgcaagaaactgttttcctgctgccgtcagcaatacactgcgattggttcgtgccagcagtcgggcaccaatttgttgctccagcgcctgaatctgctgacttagcggcggttggctaatattcaggcgggcagcggcgcgcccgaaatgcagctcttccgcaacagcaacaaagtaacgcagatgacgaagttcaatattcatatttaaaacatcttatttgagattattaatatattagacagaacaattcgattttcctaccctatgtataagcctgatctacaggcatatttagcaaggatttcaagtgagccgtactacaactgttgatggcgctccggcaagcgacactgacaagcaaagcatttctcagccaaatcaatttattaaacgcggtacgccgcaatttatgcgcgtcaccctggcgctgttctctgccggactggcaacatttgcacttctctattgtgtgcagcctatccttccggtgcttagccaggagtttggcttaacccccgcgaacagtagtattagtctgtccatttccacggcgatgttggctattggtttgctgtttactggcccgctatccgatgccattggtcgcaaaccagtgatggtcacggcgctactgttggcctccatttgtacgttacttagcacaatgatgaccagctggcacggcattttgattatgcgcgccttgattgggcttagcttaagtggcgtggcagctgttggcatgacttatcttagcgaggaaatccatcccagtttcgtggcctttagtatggggttgtatatcagcggcaacagtattggcggcatgagcggacgcttaattagcggtgtcttcacggactttttcaactggcgaattgctctggcggcaatcggttgtttcgcgctggccagcgcgttgatgttctggaaaatcctccctgaaagtcgccattttcgcccgactagcctgcgccctaagacgttgtttatcaactttcgtctgcactggcgtgaccggggattaccgttattgttcgcagaaggctttttgctgatggggagcttcgtcacgctgtttaattacatcggctatcggttgatgctctccccctggcatgtcagtcaggccgtggttggcttattaagcctggcttatttgaccggtacatggagcagtcccaaagccggaaccatgaccacccgctatgggcgtggtccagtgatgttgtttagcacgggggttatgctgtttggtttactgatgaccttattcagcagcctgtggctgatctttgccggaatgttactcttcagtgcaggattcttcgcagcccacagtgtagccagcagctggatcggcccccgcgcaaaacgcgctaaaggccaggcctccagcctgtatctgttcagttactatctggggagcagtattgccgggacgctgggtggtgttttctggcataactatggctggaacggcgtcggcgcatttattgctctgatgctggtcattgctctgctggtcgggacgcgtttgcatcgtcgtctgcacgcctgaaaaataagtccggactgcggtaaatacccgtccggacttattgccagctcaaaccaacgttaatagccatcctaaaatagacgaagcgccagccaattcccgcagcgcgtctagcgtcatcaggattataagtacccaaataaacggattcattttgctgtgtgtcatttattactgatgcgcagttattctactgctttgtaagtagtaaaatagttaacccgatcaagactactattattggtagctaaatttcccttaagtcacaatacgttattatcaacgctgtaatttattcagcgtttgtacatatcgttacacgctgaaaccaaccactcacggaagtctgccattcccagggatatagttatttcaacggccccgcagtggggttaaatgaaaaaacaaattgagggtatgacaatgaaaaaagtattagctctggttgttgccgctgctatgggtctgtcttctgccgcctttgctgcagagactacgaccacacctgctccgactgcgacgaccaccaaagcagcgccggcgaaaactacacatcataaaaaacagcataaagcagcacctgcccagaaagcgcaggcggctaaaaagcatcataaaaatacgaaagctgaacagaaagcccctgaacaaaaagcgcaggcagcgaagaaacacgccaagaaacacagccatcagcaaccggcaaaacctgctgcacaacccgcagcgtaagttttcaacagtaatgctggcgcgccccctcgcgcctgaaaattacggtgctaagcgggtaacgtttagcaccgcctttagcggagggtagtatggtgggccgttatcgctttgagttcattctgatcatccttattttatgcgcactgattaccgcccgtttttatctttcctgattgtagttatctgattttactcccactttcatcccgtcccgtctatagtatttatgagggtttgcttttaataatcataattacccaccagagtgtgatatgcgtacaaccattgctgtagtgttgggtgcaattagtttgacgtctgcttttgtgtttgcagataaaccagacgttgccagaagcgcaaacgatgaggtcagcaccctgttttttggtcatgatgatcgtgtgccagtgaatgacacgacccaaagtccgtgggatgcggttgggcaactggaaacggccagcggcaatttatgtacggcgacgctgattgcacccaatctggcattaacggcaggacactgtttattgacacctccaaagggtaaagccgataaagcagtggcgctgcgttttgtgagtaataaaggtctttggcgctatgagatccacgacatagaaggccgcgttgatccgacactgggaaagcggttaaaagcagatggggatggttggattgtacctcccgcagccgcgccgtgggacttcggattgattgtgctacgtaatcccccttctggcattacgccgttgccgttatttgagggagataaagccgcgcttaccgccgcattaaaagcggcaggtcgtaaagtgactcaggcaggctaccctgaagatcatctcgatacgttgtacagtcatcaaaactgtgaagtgactggctgggcgcaaacgagcgtgatgagtcatcagtgcgataccttgccgggtgacagcggtagccctctgatgttgcataccgatgacggctggcaattaattggggtgcaaagtagcgctcctgccgcgaaagatcgctggcgcgccgataaccgggccatttctgttaccggttttcgcgacaagctggatcaactgagccaaaaataatgttcaaacgctgcccgacagcgcgggcagcgtcttcatcaggcaagtttcaccatgatcattccagccaacagcaagaccaggccaatccagcctttacgatttaaccgttgaccaaacaagatccaacctgcggctaacgtggcggcaataccaaacccgccccacaatgcataagcgacagacaagtcgatccctttaacggcttgagaaagcgcactaaaggcagccagcaccgccgccagggagagcaagccaaatattttgcgacgaaagccgtcagaaaatttcaaaaagacgttagcaacgatttccagcacgattgccaatgccagccaggcggcgtgaacccattcaaactgcgccatggttcacctccagttcaggtttacgcgctttacgggtaccactttttatcaacacaatcccggcgaccagggtggttaacccggcaattttcatcaggcttaaactttcgtcgaataacaaaacgctaaacaaggtaataaataaaataccgataccttcccacagcgcataagctacgcctaaggcgatttttttaacggcgaaagagagaaatatatagctcagagaaatcatcaccagcattaaaataaagccgccatttccctcactgacgctcgcccatttcatactcagcgtaccggtaatttctgtagcaatagccagacctaataaaatccaataaatatacattgtccttctcctgcaagagaattattttaattttcgcttaattcagcgaaaccaaagtaaagtggtcaagccccgcgcatagcgcaagctttggcagaagaaaggactaaagcgcgttgcgccagtgctgctcacctacgagcaagatagtggatgaggtacgaagatgggtaaatgtagaaaataacgtcctgaacaaattgtccataatattacaattatccgcagtgttgcttctcgtcatcgcggatgataattgtcctcggtagttgaacacgcctgatttgtatcatagcttaagaattaactcaaaatattttcacttctttacctgagcggtttgattttcgttatgatgacggagcgaaaaagacattattattagcaaaggaagaaaaaacggggacaagcatggcaaagccgatcatcacgctcaatggcctaaaaatcgtcattatgttgggaatgctggtcattattctctgcggtatccgttttgccgccgagatcatcgtgccgtttattctcgcattatttattgctgttattcttaacccgctggtgcaacacatggtccgctggcgtgtgccgcgtgtactggcggtgagcattttgatgaccatcatcgtgatggcgatggtgttgctattagcttatctgggttccgcgctcaacgagttgacgcggacgttaccgcaatatcgcaactctattatgacgccgctgcaagcgcttgaaccgttgttgcaacgcgtagggattgacgtcagtgttgaccagctggcgcattatattgatccgaacgcggcgatgacgttgctcaccaacttattgacgcagttatctaatgccatgagtagtatatttttattgctgctgacggtgctgtttatgctgctcgaagtgccacaattgcccggaaaatttcagcaaatgatggcgcgtccggttgaagggatggcggcgattcaacgtgcgattgacagtgtttctcattatctggtgctgaaaacagccatcagcatcatcaccggcctggtcgcctgggcgatgctcgccgcactcgatgttcgcttcgcttttgtctggggattgctggcctttgcgcttaattacatcccgaatattggtagtgtcctcgcggcaatcccccctatcgctcaggtactggtgtttaatggcttctacgaagcgttgctggtgctggcgggatatctgctgattaatctggtcttcggcaatattctggagccgcgtatcatggggcgtgggctggggctttccacattggtggtatttttgagcttgattttttggggatggttgttaggaccggtgggtatgctgctttccgtgccgttgacaattattgtcaaaattgcgcttgaacaaacagcgggaggtcaaagcatcgccgttctgttaagcgatctcaataaagagtgacggcctcagcagaggccgtcagggttacagagctttcaggattgcatccacgctggctttggcgtcaccaaacagcatgtgggtgttttccttgaagaacagcgggttttgcacaccagcatagccagtgttcatgctacgtttaaagacaatcacgttctgcgctttccacacttccagcacaggcataccagcaatcggactcttcggatcatcctgcgccgccgggttaaccgtatcgttagcaccaatcaccagtacggtatcggtatcagcaaagtcatcattgatctcgtccatttccagcacgatgtcatacggtacttttgcttcagccagcaatacgttcatatgtccaggcaaacgccccgcgaccgggtggataccgaaacgcacattaataccacgagcgcgcaatttctcagtaatttcagcgacaggatattgcgcctgcgcgactgccatgccgtaccccggagtaatgatcacactatgggagtttttcagcagttccgctgtctcttctgcggtgatttcgcggtgctcacccacttcctgatcatcgccagtagaagagccgtcggtgccgaaaccacccgcaataacgctgataaaggaacggttcatcgccttacacataatgtaagaaaggatagccccgctagaaccgaccagcgcaccggtcacaatcagcaggtcgttgctgagcataaagcccgcagccgcagccgcccagccggagtagctgttcagcatgctcaccaccactggcatatctgcaccaccgatggaggcgactaaatgccagccgaataccagcgcaattgcggtcattatcagcaatgccagcacttgcaggccgacgctgtccgtgcgaacaaatacaatcagcagcaggaaggaaacgaccagagccgccaggttcattttgtgacggtttggcagcatcaatggtttagagctaatcttgccacacagtttgccgaacgccaccacgctacccgtgaacgttaccgccccgatgaagataccgaggaacacttccgtcaggtgaatattgaccagaatcggtgccattcccgcgtcatgatgcagatagctgttaaagccaaccagcactgccgccagacccacgaagctatgcaggatcgccaccagttctggcatttcggtcatttcaactttcttcgccagacggataccaattgccccaccaatgaccatcgccagcaagatccagccaacattacccgtatccggtccaaaaatggttgcgattaacgcaatcgccatcccggcgataccgaagttgttaccctggcgagacgtttcatgtttgctaagaccggccagactgaagataaacaggatcgcggcaacaatgtatgcagctgtaactaatcctccagacatatgttaccccttaatttttgcggaacattttcagcatgcgctgagtcacggtgaagccaccgaaaatattaatgctggctataagcaccgcgataaaactaaggaagctaacccagccgccctggccaatctgcaacagtgctccgacaacaataatcccactaatcgcgttggtgacgctcatcaacggtgtatgcagcgcgtggcttacattccacaccacgtaataaccgacaacgcaggccagcgcgaaaacggtgaagtgcccaaggaattctttcggcgcaacgcttgccatccagccaaaaagaatgattgccagcgccatcaacgcgtatttacgccacggactgcaggtacatttttcctcagttttcacttccggtgccgctttttgtgccgcctgcggctgagcacttacctgaatcggcggtgccggccaggtaatttcgcccgcacggatcacggtcacgccgcgaatcaccacatcatcaaaatcaacagtgatattgccgtctttctctttgcacaacagtttcagcagattaacgaggtttgtgccgtaaagctgactggattgcgtcggcagacggcccggaagatcggtataaccaatcactttgacaccattttccgtagtgaagatttcacccggcacggtgtattcacagttgccgccgttttgggctgccaggtcgacaatcacactgcccgccttcatggagtcaaccatttcacgggtaattagcttcggcgctggtttgcctggaataagcgcggtggtgacaatgatatcgacctcttttgcctgggcggcaaagagttccatttccgctttgatgaacgcgtcgctcatcactttggcatagccatcgccgctgccagcttcctctttaaaatccagctcgaggaattccgcgcccatactttgaacttgttctttcacttccgggcgggtgtcgaatgcacgcacaatcgcgccgagactgtttgctgcgccaatggcggccagacctgcaacacccgcaccaatcaccatcacttttgccggtggcactttcccggccgcagtaatttgcccggtaaagaagcgcccaaattcatgtgccgcttcaacaatggcgcgataaccggcgatgttcgccatgctgcttagtgcgtccaggctttgtgcgcgactgatacgcggcacagagtccatcgccatcacggtcacgttacgttccgcaagtttttgcattaattccggattctgcgcaggccagataaaactcaccagcgttgtcccaggattcagtaacgcaatttcatcatctaacggcgcattgaccttcagaatgatctcactctgccagacgctattcccttctacaatttcagcgcccgcttgcacaaacgctttatcgtcaaaacttgccagttgacccgcgccgctctctaccgcgacggtaaaacccagtttcagcagctgttccactgtttttggcgttgctgcaacacgggtttcattggttaaccgttctcttggtatgccaattcgcatgatattcccttccatcggttttattgatgatggtttgcctgtgtcaggagccacacaagctgctcatgtacgagctaaatgttactccgttaaaataaattagtaacaaacgccctataacgtactgaaaattatgcctgtgatctagcgccaaaaatcagtatttcggcgtgaactcgcaaaatattaacgattcagccgtgatagtgggataaacaccttagaacgccggataaagactgataattgtcttcgacggtcgggtaaaacgagacatcgccccggcacgaatcactacttaacattaaattaacttatacaattcagttgcttcagtagtaatgatgctgatacggctgttttttaagcatagacggtcatttgagcaggattaaaattggcttaaggaatgtgatatgaaaaatgacgcagacagttacaccgtttaaatgcaataatcagccacgtttctcgttaataacaataccagtacctggtttgcgcaaggcgaaggattatttttatgaagcttaagaacaccctcctggcgagcgcactgctttctgctatggcattctccgttaacgcagcaacagaactgacaccggagcaagcggcagcggttaaaccttttgaccgtgtagtggttaccggtcgttttaatgctattggcgaagcggtgaaagccgtttctcgtcgcgcagataaagaaggtgccgcctctttttatgttgtcgacacttctgattttggtaacagcggtaactggcgtgtggtcgctgacctctataaagccgatgctgaaaaagcagaagaaacaagtaatcgcgtaattaacggtgttgtcgaactgccgaaagatcaggctgttctgattgaaccgtttgacacggtcaccgtccagggcttctatcgtagccagccagaagtcaatgatgccatcaccaaagcggcaaaagcgaaaggtgcctactctttctacatcgttcgtcaaatcgatgccaaccagggcggcaaccagcgtattactgcattcatctataaaaaagatgctaagaaacgtatcgtccagagcccggatgtgatcccggcagattccgaagcaggacgtgcagctctggctgccggtggcgaagccgcgaagaaagttgagatcccgggtgttgcgactaccgcaagtccaagttctgaagtcggtcgcttctttgaaacccagagtagtaaaggcgggcgttacaccgtcacgctcccggatggcactaaagtcgaagaactgaacaaagcgaccgcagcgatgatggtcccgttcgacagcatcaaattctctggcaactacggcaacatgaccgaagtctcctatcaggttgcgaaacgtgccgcgaagaaaggtgctaagtattaccacatcacccgccagtggcaggaacgtggtaataacctgaccgtcagcgcagatctgtataaataactattcagttactcctataaggcggcttgatgccgcctttcgcatttttagtcacaaatttccccgcgaccattgcatgcagacacatctcttcgtaaaatcccgcgcttcagtggcaaactccatttttatgcgttttgccctaatatttattcttcttatcacgttttaatcactggatatcgatggaaaagaaactgggactgagcgcactcaccgcgctggtattaagcagtatgctgggcgcgggtgttttcagtctgccgcaaaatatggcggcagttgccagcccggcagcactgctcatcggctggggtattactggcgctggcattttattgctggcctttgccatgctgatcctcacgcgcattcgtcccgaacttgacggcggtatctttacctatgcccgcgaagggtttggcgagctaatcggcttttgttccgcatggggatactggctgtgcgcagtcatcgccaacgtctcctatctggtgatcgttttttccgcgttaagcttttttacggacacgccggaattgcgcctgtttggcgatggtaatacctggcaaagcatagtcggtgcaagcgctttattgtggattgttcactttttgatcctgcgcggggtgcaaaccgctgccagcattaacctggtggcgacactggcaaaattgttgccgctgggtctgtttgttgtgctggcgatgatgatgttcaaactggataccttcaagctcgacttcaccggacttgcacttggcgtacccgtttgggaacaggtgaaaaacaccatgctgatcaccctgtgggttttcattggtgtggaaggtgccgtggttgtttctgcgcgtgcgcgtaataaacgtgatgttggcaaagcgacactgctggcggttctctccgctctgggcgtttacttgctggtaacgctgcttagcctgggtgtggtggcacgtcctgaactggctgaaattcgtaacccgagtatggccggtctgatggtggaaatgatgggaccatggggcgaaatcatcatcgctgccggtttgatcgtttccgtttgcggcgcgtacttaagctggaccatcatggcagcagaagtaccgttcctggccgccactcataaagcattcccgcgcatttttgcgcgccagaacgcacaagctgcgccatccgccagtctgtggttgaccaacatctgcgtgcaaatttgtctggtactcatctggctgaccggttccgattacaacacgttgctgaccatcgccagtgaaatgattctggtgccctatttcctggtcggcgcgttcttgctgaaaatcgcaacccgtccactgcataaagcggtaggtgtcggtgcctgcatttatggcttatggttattgtacgcctctggtccaatgcacttgctgttatccgttgttctgtatgcaccggggctgctggttttcctgtacgcgcgcaaaacgcatacccatgataatgtactgaaccgtcaggaaatggtgctgattggcatgctgttaattgccagtgttccggcgacctggatgctggtgggataacgttcatcccatcgttggatagcaaaggagataacgatgggtaaaacccagcccttgccaatattaattactggcggaggtcgtcgcatcggcctcgccctcgcatggcatttcattaatcaaaagcaaccggtgattgtcagctatcggacacactatccagccattgatggactgattaatgcaggtgcgcagtgtattcaggctgattttagcaccaacgacggtgtgatggcgtttgccgatgaagtactaaaaagcacccatggtctgcgtgctattttgcataacgccagtgcgtggatggcggaaaaaccgggtgcgccactggccgacgtactggcttgcatgatgcagatccacgttaataccccatacctgctcaaccatgcgctggaaagattactgcgtgggcacggacacgccgccagcgatatcattcactttaccgattatgtggtggagcgcggtagcgacaaacatattgcgtatgctgcaagcaaagcggcactggataatatgacccgcagctttgcccgcaagctggcaccggaagtgaaagtgaattctattgcgccaagcctgatcctgtttaatgaacatgatgatgccgaatatcgacaacaggcgctgaataaaagtctgatgaaaaccgcgcctggcgagaaagaagtgatcgacctggtcgattacttacttaccagttgctttgtcaccggacgcagtttcccacttgatggcggtcgtcatctgcgttaatgcagctttatccagcatataatcaacacccatgcgcttatcccccaacacgcaacagaaccaacaaaagcggcgggcaagcgcatcattccggtgaaataccacaggctcaccaggtaaacaaaatagggaataatgctccacatactaaaaatgatggttgcgcgtaaggcttcaatgccgcgttcgctggcaacaatataatgcgcgataagcgcaaaggtcgggaaaagtggaatcagcccggcgatataataatttttcgtttttgctaaaacaccaatcaacagcactaccagcgcaccgagcgcggctttgattaccagccccatctttttaccttaacacttccataacaagtcatcagtagaatacctgatgaaaacttgtttagaaacgattgatagtaagtaaaaacagcgcggtgtattgtgacgtttttatatctaccgtgaatgttatgaacactatcgtatttgtggaagatgatgcggaagtcggtagtctgattgccgcgtacctggcaaaacatgatatgcaggttaccgtagagccgcgcggcgaccaggccgaagaaaccattttgcgagaaaatccggatttggtgttactcgacatcatgctaccaggcaaggacggcatgaccatttgtcgtgatttacgcgcaaagtggtctggaccgattgttcttctaacctctctcgatagcgatatgaaccacatcctggcactggaaatgggtgcctgcgactatattctcaaaacgacgccccctgctgttttgctagcgcgtttacgtttgcatttgcgtcagaatgagcaagccacactgaccaaaggtcttcaggaaacgtctctgactccctacaaagccctgcatttcggcacgttgaccatcgatcccatcaaccgcgtagtcaccctggctaacactgaaatcagcctcagcacagctgatttcgaattattgtgggaattagctacccatgccgggcaaatcatggaccgcgatgcattgctgaaaaatttacgcggcgtcagttatgacggactggatcgtagcgtggacgtggctattagccggttaagaaaaaaactgctcgataacgccgcagaaccttatcgcattaaaactgtgcgtaacaaaggctatctttttgcgcctcatgcatgggaataagcgatgaaaaaactgtttatccagttttacctgttattgtttgtctgcttccttgtgatgtctctgctggttgggctggtgtacaaatttaccgccgaacgcgcgggcaaacagagcctggatgatttgatgaacagtagcctgtatctgatgcgcagcgaattgcgtgagatccccccacacgactggggtaaaactctgaaagagatggatttaaatctctctttcgatctgcgtgtcgagccactgagtaaataccatcttgatgatatttccatgcaccgactgcgtggcggcgaaattgtcgccctggacgatcagtacacgtttttgcagcgtatcccgcgcagccactacgtgctggcagttggtcctgttccttatctttattatctccatcagatgcgattgctggatatcgccctgatcgcttttattgctatttccctcgcctttccggtgtttatctggatgcgtccgcactggcaggatatgttaaaactggaagcagcggcgcaacgatttggcgatgggcatctcaatgaacgtatccactttgatgagggtagcagctttgaacgacttggcgtcgcatttaaccagatggcggacaatatcaacgccttaattgccagcaaaaaacagcttattgacggtatcgctcacgaactgcgaacaccgttagtgcgcctgcgttatcgactggagatgagcgataacctgagcgccgccgaatcccaggcgttgaatcgtgatatcagtcaacttgaagctttaattgaagagctgctgacttatgcccgactcgatcgcccacaaaacgagcttcatcttagcgaaccagacctgccgttgtggctgagtacgcatctggcagatattcaggcagtaacgcccgataaaacggtacggataaaaacgctcgtgcaaggccattatgcggcgttggatatgcgcttaatggagcgcgtgctggataatttgctcaataacgccctgcggtactgccatagtacggttgaaaccagcctgctactgagcgggaatagagcgacattaattgttgaggatgatggcccagggattgccccagaaaaccgcgaacatatctttgaaccttttgttcgcctcgatcccagccgggatcgcagtaccggcggctgcgggctggggctggcaattgtccactctatagcactggcaatgggcggtacggttaattgtgacaccagcgaactgggtggtgcccgcttcagctttagctggccgttatggcataacatcccgcaatttacctctgcctgacactacgcgcacgatggtcaagtcaccacgactgtgctataaaataagtatgttgtaactaaagtggttaatattatggcgcgttacgatctcgtagaccgactcaacactacctttcgccagatggaacaagagctggctatatttgccgctcatcttgagcaacacaagctattggttgcccgcgtgttctctttgccggaggtaaaaaaagaggatgagcataatccgcttaatcgtattgaggtaaaacaacatctcggcaacgacgcgcagagcctggcgttgcgtcatttccgccatttatttattcaacaacagtccgaaaatcgcagcagcaaggccgctgtccgtctgcctggcgtgttgtgttaccaggtcgataaccttagccaagcagcgttggtcagtcatattcagcacatcaataaactcaagaccacgttcgagcatatcgtcacggttgaaagtgaactccccaccgcggcacgttttgaatgggtgcatcgtcatttgccggggctgatcacccttaatgcttaccgcacgctcaccgttctgcacgaccccgccactttacgctttggttgggctaataaacatatcattaagaatttacatcgtgatgaagtcctggcacagctggaaaaaagcctgaaaagtccacgcagtgtcgcaccgtggacgcgcgaggagtggcaaagaaaactggagcgagagtatcaggatatcgctgccctgccacagaacgcgaagttaaaaatcaaacgtccggtgaaggtgcagccgattgcccgcgtctggtacaaaggagatcaaaaacaagtccaacacgcctgccctacaccactgattgcactgattaatcgggataatggcgcgggcgtgccggacgttggtgagttgttaaattacgatgccgacaatgtgcagcaccgttataaacctcaggcgcagccgcttcgtttgatcattccacggctgcacctgtatgttgcagattaacgcccggctttcatactgccgaccatctgttctggccgtacccagctgtcaaactcggcttcgctaagataccccagcgcaagggccgcagcttttaaggtcagcccttctttatgcgcttttttggcgatctcggcggctttgtcataaccaatgtgggtgttaagcgcagtcaccagcatcaggctttcattgagtaattgattgattcgctcacgattcggttcaatacccactgcgcagtgtttgttaaaactttccatgccatctgccagcaagcgcacgctttgcaggaaattgtggatcaccattggacggaagacgttcagttcaaagttaccggaagcgccccccatgttgatcgccacgtcgttccccatcacctgacagcagagcatggttaatgcctcacactgtgttgggttcactttccccggcatgatactgctgcccggctcattttccgggatactgatttcaccaattccgcagcgcgggccagaggccagccagcggacatcattggcgattttcatcagactcgcagccaaccctttcaacgcgccgtgcgcctgaaccagggcatcacaggtcgccagcgcttcaaatttgttcggcgcggtaacaaacggtgcacaggtaatgactgccagttcatctgctacgcgacgcgcatactccggatgggtatttagtccagtacccaccgctgtaccgccaagagccagttccgctacgtgaggcaggctgtattcgatatgtttgagattatgctcgagcatcgctacccagccggaaatctcctgccccagcgttaacggcgtggcatcctgcaagtgagtacgaccaattttgacgatatcggcaaaagcacgggatttctcattcagtgtctgtgtcagggttttaagctgaggaatgagttgcttgcgcagcgccagcagcgccgcaacgtgcatcgccgtcggaaagacatcgttggaactttggcttttgttcacgtcgtcgttagggtgaactttacgttccatcccgcgcacaccgccgagtaattcactggcccggttagccagcacttcgttcatgttcatgttactttgcgtgccggagccggtctgccagatagccagcgggaattcgtcgtcatgctgtcctgccagtacttcatccgccgcctgacgaatggcgctcgctttctcttcagacaacaagcctaaatcttcattaacttttgccgctgcacgcttggttagcgccagcgcatgaatcagactggtgggcattttctccgtgctaatgcggaaatgctccaggctgcgttgagtttgtgcgccccacagcttatctgccgggacatcaatcgcccccatgctatctttttcgctgcgtactgtattcatgacctgctcctcacctgattaattttttctttctgttttgctttcgttaagcaacttttagctcacttattatttaccatttgataacaaatgtttggtctttcgtgccatgtaaaaaaaccgccccgaagggcggctctgtttatttcacacagcgggtgcattgtgtgagttgtatctgctggaagaagtcatttcctttatcatccacaaggataaacgccgggaaatcttccacttcaattttccagatggcttccattcccagttccggatattcaacacattccaggctcttaatacttccctgcgccaatacagcggccggaccaccgatactgccaaggtagaagccgccgtgttttttacaggcatccgtcacctgctggctgcggttgcctttcgccagcatgatcatacttccgccctgcgcttgcagttgatcgacataagaatccatccgtccggcggtcgttgggccaagagaaccggaggcataaccttccggcgttttggccggacccgcgtagtaaatcggatgatctttgatgtactgcggcagcccttcaccgttatccatccgctctttcagtttggcgtgagcaatatcacgaccgacgataatcgtgccgttaaggcttaagcgtgtagaaacgggatactggctcaactgtgcgaggatctctttcatcggacggttaaggtcaacgcgcaccgcttcgccttctcccgctttgcgcagctcttccgggatatatttgcctggattatgttccagtttttcgatccagatcccctgacggttgatcttcgctttgatattacggtcagcagagcaggagacgcccataccgaccgggcaggatgcgccgtgacgtggcaggcgaatcacgcggatgtcgtgagcgaagtatttaccaccaaactgcgcacccagaccaagattttgcgcttcgatcagcaattctttttccagttccacatcgcggaacgcctgaccgtgctcattcccttccgttggcagttcatcatagtatttcgcggaagccagtttcaccgttttaaggttcgtttctgcagaagttccaccaataacgaacgcaatatgatacggaggacaggccgccgtacccagcgtgcgcatcttctcaaccaggtaatttttcagtttccccggcgtcagtaacgctttggtttcctgatagagatacgtcttgtttgcgctaccaccacctttggcgatacagaggaatttgtattcgtcgccatcaacggcataaagatcgatctgcgctggcagattggtgccggtattcacttctttatacatatccagcggcgcgttttggctgtagcgcagattatcttcgatataagtgttatagacaccgcgcgccagcgccgcttcatcaccaccaccggtccatacacgctgcccttttttaccaacaataatcgcggtgccggtatcctgacaggttggcagaacgcctttcgccgcgatgtcggagttacgcaggaattgcagcgccacatatttatcattttcgctggcctccgggtcacgcagaatgtcggccacctgttgttggtgcgccggacgcagcatgaagctcgcatcatgaaacgcctggcgcgccaacagagttaacgcttcgggtgcgactttcaaaatctcctgcccttcaaattcagatacgctaacgtgttcgctggttagcaggtaatactcagtatcatcttttttgagtggaaaaggagcctgataatgaaagggtttgttactcattgttctctcacttactgcctggtttggttatgctctgggcgggtgttccgttgccctgttaaaagcgagtaacaatatcctacacacttttttaacaaaaactgagactagtacgactttttgcggctccaggttacttcccgtaggattcttgctttaatagtgggattaatttccacattaaaacagggattgatcatgcaaaaactcattaacagtgtgcaaaactatgcctggggcagcaaaacggcgttgactgaactttatggtatggaaaatccgtccagccagccgatggccgagctgtggatgggcgcacatccgaaaagcagtagtcgagtgcagaatgccgccggagatatcgttagtctgcgtgatgtgattgagagtgataaaagcactctgctcggagaggccgttgccaaacgctttggcgaactgcctttcctgttcaaagtattatgcgcagcacagccactctccattcaggttcatccaaacaaacacaattctgaaatcggttttgccaaagaaaatgccgcaggtatcccgatggatgccgccgagcgtaactataaagatcctaaccacaagccggagctggtttttgcgctgacgcctttccttgcgatgaacgcgtttcgtgaattttccgagattgtctccctactccagccggtcgcaggtgcacatccggcgattgctcactttttacaacagcctgatgccgaacgtttaagcgaactgttcgccagcctgttgaatatgcagggtgaagaaaaatcccgcgcgctggcgattttaaaaagcgccctcgatagccagcagggtgaaccgtggcaaacgattcgtttaatttctgaattttacccggaagacagcggtctgttctccccgctattgctgaatgtggtgaaattgaaccctggcgaagcgatgttcctgttcgctgaaacaccgcacgcttacctgcaaggcgtggcgctggaagtgatggcaaactccgataacgtgctgcgtgcgggtctgacgcctaaatacattgatattccggaactggttgccaatgtgaaattcgaagccaaaccggctaaccagttgttgacccagccggtgaaacaaggtgcagaactggacttcccgattccagtggatgattttgccttcagcctgcatgaccttagtgataaagaaaccaccattagccagcagagtgccgccattttgttctgcgtcgaaggcgatgcaacgttgtggaaaggttctcagcagttacagcttaaaccgggtgaaagtgcgtttattgccgccaacgaaagtccggtgactgtcaaaggccacggccgtttagcgcgtgtttacaacaagctgtaagagcttactgaaaaaattaacatctcttgctaagcttattaaaggcttataacaccttcaggcggccagtccgcctgatttcattttatggataatcattatgaataaaagcctggtagcggtaggcgtcattgttgcgctaggcgtagtctggacaggcggcgcatggtatacaggcaagaagattgaaacccatctcgaagacatggtcgcgcaggcgaacgcgcaactcaaactgacagctcctgaatccaacctggaagtgagttatcaaaactatcatcgcggcgtattcagcagccagttgcaactgttggtgaaacccattgccgggaaagaaaatccgtggattaaaagcggtcagagcgtcatcttcaacgaaagcgttgatcatggtcccttcccgcttgcccagcttaaaaaactgaacctgatcccgagcatggcaagtattcaaaccacgctggttaataacgaagtaagcaaaccactgtttgatatggcaaaaggtgaaacgccttttgagattaacagccgcattggttacagcggtgattccagttccgatattagcctcaagccactgaattacgagcaaaaggatgaaaaagtcgcctttagcggcggcgagttccagttaaatgctgacagagacggcaaagccatctccctttccggggaggcgcaaagtggtcggatagacgcagttaacgaatacaaccagaaagtgcagttgacctttaataatctgaaaaccgacggttccagcacgctggcaagttttggtgagcgtgtaggaaatcaaaaactgagtctggaaaaaatgaccattagtgtggaaggcaaagaactggcactgctggaaggcatggagatcagcggtaaaagcgatctggtcaatgacggtaaaacgatcaatagccaactggattacagcctaaacagcctgaaggtacagaatcaggatctgggcagcggcaagctgactttaaaagtcggccagattgatggtgaagcctggcatcagtttagccagcaatataacgcgcaaactcaggcgctgctggcacagccagaaattgccaacaaccccgaactttatcaggagaaagtgacggaagccttctttagcgccctgccgctgatgctgaaaggcgatccggtgattactatcgcgccgctaagctggaaaaacagtcagggtgaaagtgccctgaatctgagcctgttcctgaaagatccggcaacgactaaagaagcgccgcaaacgctggcgcaggaagtagatcgtagcgttaaatctctggatgcgaaactgaccattccggtggatatggcaactgagtttatgactcaggtagcgaagctggaaggttatcaggaagatcaagcgaaaaaactggcgaaacagcaagttgaaggtgcaagtgcaatggggcagatgttccgtctgaccaccttgcaggacaataccatcaccaccagcctgcaatatgctaacggtcagataacgttaaatgggcagaaaatgagcttagaagattttgttggcatgtttgcgatgccagctcttaacgttccggctgtaccggcaattccgcagcagtaattcacggccaaaacgccggagaattttcactccggcgttttcatctgaaaacaaaccagagattgcctgatgcgctacgcttatcaggcctaccttttcctgcaacactttgaatttatgagtttttgtaggctggataaggcgtttacgccgcatccggcataaaaaacgcgcactttgtcaacaatctgaaacgccggagatttttctctccggcgttattttttacttcagcataaagtcatactgaatactcattttcacatcccagtaattcaggcgatcgcccagcgtactgccatcgcgcttttcccgccctttatcggcagcaagaaagaaattcatcccttgtaacggcccttcgctgacccgatagttcataccacctaagatacccgtgccttcaatccgcacatctcgtttactggattcatagccgcgagtcacaatcggtgcaaatgtcagcgtaaattgcggcgttaaacgatagttgacgcccaattgccaggactgcattccttcacggttacgatcaagacttaaactaaagggatagccaatgtcggtatccaccacggcaccattcattgcatggcgcaaataaccaccactgccaaatacacttccccacggcgcattccaggtcaattgtccactaaccaacgccgtttcattgggctggctggtattacgacttaaaccttcgagctgcgcgtaaaagccgagcaactcccctttcaacgtataattcgggtcgagcggtatgcttttctcgagaatactttgtatctgattggaaacatctttctgtacgcttgcccccagagaatagcgactggtatcatcatgccaactggcggctaaaaaagaacgtgcgcgatgtttatcgtattttcccgtctggctgttatacaccccttcatcacgaataccggttgtactatcagtccataaaaatactcgactacgccacattccccacagatcaatatttggtgttaaagcccaataacctaatgctccttcagaaactgtcggtaatgtacgttggctactgccagccattaacggaatacgataaggtaagctaccataactataatccgtcccgaagcgacctaatttaagcaggctattttcactgggttttatttttactgcccccagggcaaagccaaaacttttatcaccatcaagataccaccgggtactcatatcagcacgagcacctaatttataaacataatacgccccgccttcaacgccaataatattggaataataaccactattgaaatcgagcaatcctccctgtacccatgcgtaaatatctcttcccgcgccagcactgggcttatccgccctgcgcaattcgtttttcagtctgatgcgtagtcccgcttcatcgtcagccagttgcgccgcataagcagaggtaaggccagaggcagccgtcaggcaaataacggccatggccactatttttctcatagttgcacctttgatgttctgattatttttattgaatattaattagtgatatcgctgattaattgctgctgcacttttttacgattatcaatttcaaccacgatttctttgaattttttatccgtgagcggataaaaccagataataacgaatgccagtagcataaatccgcaaggtactaaggcaatacttgtgcggatgcccataataacttccggcgtttgcacctgattggcgatatatccgcttaaccccaaaataaaggcaggaatactacctccgattgcctgaccgcatttacgggtaaaactgaatagactataggtgagcccttcaattcgcacgccggtcaggtattcaccgtattctacggtatcagcttccagcgcccacatcacggtcatggtaacgccctgaccaatactagcgatggccaacgcaaccaacgccaccggcagactccagacggaaacccagaagaacagcagataaccgcaggttcccagcaaagcgccaatcaggaaggtattctttttaccgatcctcgcgaccatccccggcaccagcggtgcgcttgccacagtaccaaccaggttttgcaccagtaccagcacagtgaacagcccggtatcatttaacacatagcgcacgtagaacaagctgctggcgctgaccgcaaaggtgctaatcagcacacacagcgcaccgatgcacaacataaacagcgggcgattccgtttcagggtttgcagactgatattcaaactcggctgcgcaacgatacgtaccacattctcacgcgtgcttttgaagcagatgaagtaaagcaccattccggcaatcgccagcacaattgtccagaaatggtatacgctcaccatctcttccgggctggagttcttaatgctcggtcctatcagaaatgccaggcagacaaaggtcaaactagcggcaatcccacgagccgcgcccagacgggcgcgggattgtggttgttgggtcatcgcggtagcaagactaccataaggaatattcaccaggctgtagcaaagcccgaggcccatgtaggtcaaatatgcatacaccactttgctaccatggctccagtcggtcagcacccagaataccagcacgctgaagatcattaacggcgcagtaccgaagagtaaaaacgggcggaattttccccagcgggtattcacactgtccaccactcgtccggcaaagacgtcggcgaaggcatcgaatacccgcaccagtaacagcatggtgcccgccgcagcggcaccgacgccagcgacgtcggtgtagtaactcaacaggaagagcgcccccattgcgaaggcgaagttattggcgacgtcaccgaggctgtagccgacgatggtgcgccaggagagttgttgattcattgtttgcctccctgctgcggtttttcaccgaagttcatgccagtccagcgtttttgcagcagaaaagccgcgctcttcggtttgcggtcgcgagtgaagatccctttcttgttaccgccaacgcgcaatatgccttggctggtcgcaaaatcggcgaaattccatacctgttcaccgacgacggcgctgacgcgatcaaagacgcggtgatacatatccagccatgcacactgatactcttcactccacatgtcggtgtacatactgtgcagcccggctaacgtatccacgccgtattcggtgatgataatcggctgatgcagtttctcctgccaggccagaagttctttttccagtaccttctctgccgtttccaaatcgccgctttggacataccatccgtaataacggttcaggcacagcacatcaaagagatcgctgatggtatcggtgtgagcgtcgcagaacattacattgacgcaggtgatcggacgcgtcgggtcgagtttacgcgttgcttccgccagtggcgcgaaatattcccgtgcaccttgcggacgggtatccggttcgttggcaatactccacatcaccacgcttgggtggtttttgtcacgcgctatcagctctttaatcgcctgtaagtgcgcttgctgagtttccccgttgactgcctcttcgctgtacagttctttcggcttgttgcccgcttcgaaaccaatgcctaaagagaggttaaagccgacagcagcagtttcatcaatcaccacgatgccatgttcatctgcccagtcgagcatctcttcagcgtaagggtaatggctggtacggtaggagttggccccaatccagtccattaatgcgtggtcgtgcaccatcagcacgttatcgaatcctttgccacgcaagtccgcatcttcatgacgaccaaagccagtaaagtagaacggtttgtggttaatcaggaactgttcgcccttcactgccacactccggatgccgacgcgaagcgggtagatatcacactctgtctggcttttggctgtgacgcacagttcatagagataaccttcacccggttgccagaggtgcggattcaccacttgcaaagtcccgctagtgccttgtccagttgcaaccacctgttgatccgcatcacgcagttcaacgctgacatcaccattggccaccacctgccagtcaacagacgcgtggttacagtcttgcgcgacatgcgtcaccacggtgatatcgtccacccaggtgttcggcgtggtgtagagcattacgctgcgatggatcccggcatagttaaagaaatcatggaagtaagactgctttttcttgccgttttcgtcggtaatcaccattcccggcgggatagtctgccagttcagttcgttgttcacacaaacggtgatacgtacacttttcccggcaataacatacggcgtgacatcggcttcaaatggcgtatagccgccctgatgctccatcacttcctgattattgacccacactttgccgtaatgagtgaccgcatcgaaacgcagcacgatacgctggcctgcccaacctttcggtataaagacttcgcgctgataccagacgttgcccgcataattacgaatatctgcatcggcgaactgatcgttaaaactgcctggcacagcaattgcccggctttcttgtaacgcgctttcccaccaacgctgatcaattccacagttttcgcgatccagactgaatgcccacaggccgtcgagttttttgatttcacgggttggggtttctacaggacgtaacataagggactcctcattaagataataatactggtcaacctttaatctgattagttaaccaattctgtgttgcacacagttatctgtgagaaacccatggaagagaaatggaaataaaaagaactgacaccgcgatcaaaaaaccaaaaactgcaatacccacagcgtgatatagatcgcattaatctttaaaacagcgttgacagaagccataaaataagcaaccgaacgttcgttcgagcgtattgggaacgataaactctcatgacatatggctacagtgaatattttggggggaattctccgaagccgggaaggataatttttgcacagagaaattacgatatgaaacgcgggcacagttatcaccagcccgccgaaaaagagagagaatcaggatgcggttaagataccgccaatcatcgcgcgtaatccctgagcaaagctcgcttcacgcgccaggtcttccgcttcgatatcggccagtacaccgtaggtcagatccagcagtaaacgactagtcattgccgtgttgatgtctgggcttatctcgcctttttgctgggcatcacgcatccgctgggcaacaaattccgtgatcgtcatatgcttatttttaagcatggcggcgacctgtgggttacgcatcccttccgccataatttcaaccaccagcgcccgttgtccaaaggcttcatgggtgagagagacaatggactcgaccatatagtcaacgaaatgaatcccttcaatcggttcccggaaacgggccagcgccctctcctggtcctgtaagataatcgcctgaatcaaggcttctttggagatgaaatggtgatagagcgtcccgggactaatggcgcaagatttacagatggctttcatgctggcactgtgaaatccattttcactaaaaatctctctggcagcattgaggatccgggtccgtgtcggttgtgcttcagtctgcatgttatccatcattaaaccattatagttagcgtgaataactagtttaccgcgttgtcaggtgagcgcctatcattgctgttgaatagtgcgaaggcacactctattcgtatacttttcactctgaaattggttaaccaatagccgtgatttggctgccagttatttagcagagacgttgatgagtttatcccggtaaacaacacgcacggttgtttaccggtccgttagtgtattaattgagctcctgtaccccaccaccggagacggtgagaatttgtccgcttacccagctcgcagcagggctgcaaaggaacagcgctgcgttagcaatatcttgcggttggcccagacgtctgatcggcgtgtgctgtaacattttttgttcaatttctggtgtaataacggatttcagggcatcggttaatattgcccccggcgcaatgccatttacccgaatatttttttcacccaggtcaaacgccatatttctgaccagatgactggccgcagctttagaacttgcataggaagtcatgtttatatttttattttctgccgccatagaagtgatggtcagaataacgccaccgccatttttttccatttctggcgcaacaagttgactcagatggaaaaaagaaaacacattcagttcataagcacggcgaaaatccgccattggcatatcaaacggtttaggtccaccgccaccggcgttgttaaccagaatatcaactttacccagcttactgatagcaaagtctgccagtgcagagagttcctgttcggaagtaatatcacaacggcaggcaaatgcctgaccacccagttgttgaatttcgtctacaacatggttagctgcgtcggcgttaatatcactgaccaccacagatgcgccagctgtcgcgaatgtaatggcgatttctttaccaatacctgcacccgcacctgtgatgatggcgcattttccgtcgagtctcaggttgtcagaattaaacacataaacctcctgtgaacttcagtaaaaataaaaggcaccgcctgtgtgccacattttttatcattaaccttgaggaaaggacactaccaggtatagcagataaagagaggattatttcgctgcaatgagccgggcgggaataataagattgcgactatgcgtctcttcatgggtgattttttgcatcatgcgatccgcaagtgtgataccaagttcccgcgctggcgtgctggcccaggtaacaggtatatcatcaagtgtggttggtgtcgcatcggtaaatgccgccaggctaacctgttgctcaaagtaacgatcgactccgctttccccgctttgccgccctgctttgagcaaaccaaaccatgcccccatcgcaatagtttcgttatagcaaaccacggcactgatggtcgggttatgacgtaaaagcgccgtgatagcttccgcggcttgcttctggctggaagtgcactccaacacccaatcgctatgaaacggcaggccaaattttagtagagttgcacaatagcccccaacccgttctgcacgggttaaactggaactttgccctcccagccaggcgatccgctgatgcccattgcgaatgagatgctccgtcaacaactgtgcagcctgcatgttgtccgggcgaaccgtatcaacatcatcaagataactggcacgggaagcgaaaatcaccgggatagctttttcttctgccatccgtcgcaggtcatcgctacttcctgcagctccggcaattaccacaccatcgacaccctgattcagtaacagactaaaccgctgtgccagctgctcaccgtctttaccgccgtgaagcaaaaaaaccatccgtccctgcgcttccagagcttccgtcaatccggccgtcaattcggcgtaaaacggcgcagataaatcacggacgatcaaaccaatgacgccgctttgcccgccgcgcagcgcgctcgcctggcgattgcgcacaaatcccagctcttcaatggcggcgttaacgcgttctcctgtggcggtagagattcgccctttgccactaagcaccaggctaacggtacttacgctcacgcccgcagccagcgcaacatcatgaatggttatttttttggcggtagccatgcagatgacctactccctgattatgtgacagataaaacgttttaccttttatttatcttatacccgctattatcgttgcgtaatgtgatttatgcctcactaaaatttgataaaacgttttatcttctcgcgcaatttactgaatccagattgttctctacgaggagtcgttttatgacggcgaaaacagcaccgaaagtcacgctgtgggagttcttccagcagttaggcaaaaccttcatgttacccgtggcattattgagcttctgcggcattatgctcggcattggtagttctcttagcagccatgatgtcataaccctgatcccggtcctgggcaaccccgtgttgcaggctatctttacctggatgagtaagattggcagctttgcttttagtttcctgcctgtcatgttctgtatcgccatcccgctgggcctggcacgcgaaaataaaggcgtagcggcattcgctggcttcatcggttatgcggtaatgaacctcgcggtaaacttctggttgaccaataaaggcattctgccaaccacggatgccgcggttctgaaagccaataacatccagagcattcttgggatccagagcatcgataccgggatcctcggtgcggtgatcgccggtattatcgtctggatgctgcatgagcgtttccataatatccgcctgccggatgcgctggcattcttcggcggtacgcgcttcgtaccaattatctccagcctggtgatgggccttgtcggcctggtgattccattagtctggccgattttcgccatgggtattagcggcttgggccatatgataaacagcgcgggtgatttcggaccgatgctgtttggtaccggtgaacgtctgctgttgccgtttggtctgcatcacattctggtggcattaattcgctttaccgacgcaggcggcacgcaggaagtctgcggtcaaaccgtcagcggcgcactgaccatcttccaggcgcaattgagttgcccgaccactcacggtttttctgaaagcgccacgcgtttccttagccaaggtaaaatgcctgcgtttctcggcggtctgccaggtgcagcgttagctatgtatcactgcgcgcgcccggaaaatcgccataaaattaaaggtctgctgatttctggcctgatcgcctgcgtcgttggcggcactaccgaaccgctggaattcctgttcctgttcgtagcgccagttctgtatgtcatccacgcgctgttaaccggcctcggcttcaccgtcatgtctgtgctcggcgtcaccatcggtaataccgacggcaatatcatcgacttcgtggtgttcggtattttgcatggtctgagtaccaagtggtacatggtgccagtggtggcggcaatctggtttgtcgtttactacgtcatcttccgtttcgctatcacccgcttcaatctgaaaaccccggggcgcgatagcgaagttgccagcagtatcgaaaaagccgttgccggtgcgccgggtaaaagtggttacaacgttcctgcaatcctcgaagcattaggcggtgccgacaatattgtcagcctcgataactgcattacccgtctgcgtttgtctgtgaaagatatgagccttgttaatgtgcaggcactgaaggacaatcgggcaattggcgtagtacaacttaatcaacataacctgcaggttgttatcgggccacaagttcagagtgtaaaagatgaaatggccggtctgatgcatactgtccaggcataaggataagatatgttcgattttagtaaggtcgtggatcgtcatggcacatggtgtacacagtgggattatgtcgctgaccgtttcggcactgctgacctgttaccgttcacgattagtgacatggattttgccactgccccctgcattatcgaggcgctgaatcagcgcctgatgcacggcgtatttggctacagccgctggaaaaacgatgagtttctcgcggctattgcccactggttttccacccagcattacaccgccatcgattctcagacggtggtgtatggcccttctgtcatctatatggttagtgaactgattcgtcagtggtctgaaacaggtgaaggcgtggtgatccacacacccgcctatgacgcattttacaaggccattgaaggtaaccagcgcacagtaatgcccgttgctttagagaagcaggctgatggttggttttgcgatatgggcaagttggaagccgtgttggcgaaaccagaatgtaaaattatgctcctgtgtagcccacagaatcctaccgggaaagtgtggacgtgcgatgagctggagatcatggctgacctgtgcgagcgtcatggtgtgcgggttatttccgatgaaatccatatggatatggtttggggcgagcagccgcatattccctggagtaatgtggctcgcggagactgggcgttgctaacgagcggcagcaaaagtttcaatattcccgccctgaccggtgcttacgggattatagaaaatagcagtagccgcgatgcctatttaagcgcactgaaaggccgtgatgggctttcttcccctagcgtactggcgttaactgcccatatcgccgcctatcagcaaggcgcgccgtggctggatgccttacgcatctatctgaaagataacctgacgtatatcgcagataaaatgaacgccgcgtttcctgaactcaactggcagatcccacaatccacttatctggcatggcttgatttacgtccgttgaatattgacgacaacgcgttgcaaaaagcacttatcgaacaagaaaaagtcgcgatcatgccggggtatacctacggtgaagaaggtcgtggttttgtccgtctcaatgccggctgcccacgtagcaaactggaaaaaggtgtggctggattaattaacgccatccgcgctgttcgttaaccccaattgcgcaacgtaaaaaatcgttgcgcaatcgtggatttttaccctgctttgtttttataatggtgcgcacttttatatccagaaaaagagtgcgaccatgattgataccaccctgccattaactgatatccatcgccaccttgatggcaacattcgtccccagaccattcttgaacttggccgccagtataatatcagccttcctgcacaatccctggaaacactgattccccacgttcaggtcattgccaacgaacccgatctggtgagctttctgaccaaacttgactggggcgttaaagttctcgcctctcttgatgcctgtcgccgcgtggcatttgaaaacattgaagatgcagcccgtcacggcctgcactatgtcgagctgcgttttagtccaggctacatggcaatggcacatcagctgcctgtagcgggtgttgtcgaagcggtgatcgatggcgtacgtgaaggttgccgcacctttggtgtgcaggcgaagcttatcggcattatgagccggaccttcggcgaagccgcctgtcagcaagagctggaggcctttttagcccaccgtgaccagattaccgcacttgatttagccggtgatgaacttggtttcccgggaagtctgttcctttctcacttcaaccgcgcgcgtgatgcgggctggcatattaccgtccatgcaggcgaagctgccgggccggaaagcatctggcaggcgattcgtgaactgggtgcggagcgtattggacatggcgtaaaagccattgaagatcgggcgctgatggattttctcgccgagcaacaaattggtattgaatcctgtctgacctccaatattcagaccagcaccgtagcagagctggctgcacatccgctgaaaacgttccttgagcatggcattcgtgccagcattaacactgacgatcccggcgtacagggagtggatatcattcacgaatataccgttgccgcgccagctgctgggttatcccgcgagcaaatccgccaggcacagattaatggtctggaaatggctttcctcagcgctgaggaaaaacgcgcactgcgagaaaaagtcgccgcgaagtaacaaaatggatggtgcaaatgcaccatccatttttcatgcaaggcacaaagtcgcgcgatgtttggcggattcgatgcccagctcaatcaactccattacctggattgcctggcttgccggaaccggattttcaccatcgccatttaacgcatcacgaatagccgcatagtaagccggataattcccaggcaccgtcaacagcgtttcttcgacacgttcctcaccttccacgcgggtaagtacgccatcacgcatatcgtagccccagtcttcctgcggtagacgctcgccatttttcagacgttcttcctgtggatcgaggccatatttcacataactgcctcgggatccatgcacgatataccgtgcactctcagcggctgccagcatggtaccgtgtaaaatgactcgccgctgtggataggacaagatggcgtggaaataatcggtgctctgcgctccgggccgtaactgtgccaaatctaccgtcatgctgaccggtaaaccaaaaagcgtaatggcctgatcaagaagatgtggtgctaaatcgtaccagataccgctgcctgggccgccctgttcacgccaacgatcgcgcacctgcggacggaagcggtcaaaatgagactcaaagtaagcaacttcacccagcacgccttccgcgagtaaaccttttagcgtcaagaaatcgctatcccagcgacggttatggaatacagacagcacacgccccaggctttttgccagcgcatccagctctcgcgcttgactcagtgtcacggtaaagggtttatcaacgaccacatgtttacccgcctcaagcgccgctttggctaacgggaaatgggtatcgttgggtgtaggaatgacaatcaggtctatgttgggatcgttaaacagatgcttcggctcagagacaaccgtaaccgttggccagtcggcttttacttttgtttcatcactgctggagattaccgccagttcctgcccgggcgtgcccgcaatcaggggcgcatggaaggttttgctcgcataaccatacccaatcaacccaacacggatgttgtcgctcatgtcattgcctctcattgaagtatgatggctatttgacactatcctttacccacgctcaacagtttaataacctgccagcaataagggatgttgtttaacttaagtcaaaaaaatagcgaattttccaacgacaaaagctaaatatcgcaaaaacctcagtaaaaatcttgctggagctattattgctaagtaacatttaccccctgaagttaatggatcaatcaagagagatgtgggctgtaatgaatcgtcttattgaattaacaggttggatcgttcttgtcgttagtgtcattcttcttggcgtggcgagtcacattgacaactatcagccacctgaacagagtgctagcgtacaacacaagtaagctctgcacttgtggagcgacatgctgcccgtccgggtgcatgttttcacttgtcggatattaaaccaggaatttattatcttgttcgatgttgttggtgattgtcagggatagtaaagcgcgttactcttttcagagcagtttttcatccctgaatatttgccatcagcgcattcttattattgtaataacacaagcgttcacttttggtgaaattttatcatcactaataatacctacccctttggtattaattattttatggaccttttatgactgttcaggactacttattaaaatttcgcaaaatcagtagtctcgaaagtctggaaaaactctacgaccatcttaattacaccctgacggacgatcaggaactgatcaatatgtatcgtgctgccgatcaccgtcgcgcagagctggtttctggcgggcgtttgtttgacctcggccaggtaccgaagtccgtctggcactatgtccaataaagaaagtagcgatcggttataaaagccttataataacgcccctaaaattagatttgcctgtttgcgtcgctattctggagaacctatgaccaccacaacgccacaacgtattggaggctggttgcttggcccgttggcctggcttttagtcgctctgttgagtacgacgctggcgttgttgctgtataccgctgcgttatcttctccgcaaacatttcaaacgctcggcggacaagcactgacgacacaaatcttatggggcgtttcttttattaccgctatcgccttgtggtattacacactgtggttgaccatcgctttctttaaacgtcggcgttgtgttcctaaacactatattatctggctgcttatttccgtattgctggcagtaaaagcattcgcttttagtcccgtggaagatggcatagccgttcgccagttgctgtttactttgttggcaaccgcattgatcgtcccctatttcaaacgcagcagccgggtaaaagcgacgtttgtgaatccgtaataaccttacagttaacctgttgtcgcctgctctggattaacggataataggcggcttttttatttcaggccgaaaaatgactgactacctgttactgtttgtcggaactgtactggtcaataactttgtactggtcaagtttctcggtctctgtccgtttatgggggtttccaaaaaactggaaaccgcgatgggcatggggctggcaacaacgtttgtgatgacgctggcgtctatttgcgcctggcttatcgatacgtggattttgatcccacttaatctgatttacctgcgcaccctggcatttattctggtgattgctgtggtcgtgcagttcaccgagatggtggtgcgcaaaaccagcccggtgctttaccgtctgctggggatttttttgccgcttatcaccaccaactgtgcagtgctcggcgtggcgttgctgaatatcaatctcgggcacaatttcttgcagagcgcgctgtacggtttttccgccgctgtcggtttcagcctggtgatggtgctcttcgccgccatccgcgaacgccttgctgtggctgatgtcccggcaccttttcgcggtaatgccattgcgttaattaccgcaggtcttatgtctctggcctttatgggctttagtggtttggtgaagttgtaatgaatgctatctggattgccgttgccgccgtgagcctgctgggcctggcgtttggcgccattctgggttatgcctcccgccgttttgcggtggaagacgatccggtcgttgagaaaattgacgaaatcttaccgcagagccagtgtggtcagtgcggttatcccggctgtcgcccctacgcggaagccatcagctgtaacggtgaaaaaatcaaccgttgcgccccaggtggcgaagctgtgatgctaaaaattgccgagttgcttaatgtcgagccgcagccgctggatggcgaagcgcaagagataacgcctgcgcggatggtggcggttattgatgaaaataactgtattggctgcactaaatgtattcaggcgtgtccggtagacgccatcgttggcgctacccgtgccatgcatacggtaatgagtgatctctgtacgggctgcaatttatgtgttgatccgtgcccgacgcactgcatcagcttgcaaccggtcgcagaaacacctgactcctggaaatgggatctgaacaccattcccgtgcgtatcattcccgtggaacaccatgcttaagttattctctgcattcagaaaaaataaaatctgggatttcaacggcggcatccatccaccggagatgaaaacccagtccaacggtacacccctgcgccaggtacccctggcgcagcgttttgttattccactgaaacagcatattggcgctgaaggtgagttgtgcgttagcgtcggcgataaagtattgcgcggccagccgcttacccgtggtcgcggcaaaatgctgcctgttcacgcgcccaccagcggtaccgttacggctattgcgccccactctacggctcatcctagtgctttagctgaattaagcgtgattattgatgccgatggtgaagactgctggatcccgcgcgacggctgggccgattatcgcactcgcagtcgcgaagagttaatcgagcgcatacatcagtttggtgttgccgggctgggcggtgcaggattcccgacaggcgttaaattgcagggtggcggagataagattgaaacgttgattatcaacgcggctgagtgcgagccgtacattaccgccgatgaccgtttgatgcaggattgcgcggctcaggtcgtagagggtattcgcattcttgcgcatattctgcagccacgcgaaattcttatcggcattgaagataacaaaccgcaggcgatttccatgctgcgcgcggtgctggcggactctaacgatatttctctgcgggtgattccaaccaaatatccttctggcggtgctaaacaattaacctacattctgaccgggaagcaggttccacatggcgggcgtagttccgatatcggcgtattaatgcaaaacgtcggcactgcttatgcagtgaaacgtgccgttattgatggcgagccgattaccgagcgtgttgtaaccctgactggcgaagcaatcgctcgcccgggcaacgtctgggcacggctggggacgccagtgcgtcatttattgaatgatgccggattctgcccctctgccgatcaaatggtgattatgggtggcccgctaatgggctttaccttgccatggctggatgtcccggtcgtaaagattaccaactgtctgttggctccctctgccaatgaacttggcgaaccacaggaagaacaaagctgcatccggtgtagcgcctgtgctgacgcctgccctgcggatcttttgccgcaacagttgtactggttcagcaaaggtcagcaacacgataaagctaccacgcataacattgctgattgcattgaatgtggggcttgcgcgtgggtttgcccgagcaatattcccctggtgcaatatttccgtcaggaaaaagctgaaattgcggctattcgtcaggaagaaaagcgcgccgcagaagccaaagcgcgtttcgaagcgcgccaggctcgtctggagcgcgaaaaagcggctcgccttgaacgacataagagcgcagccgttcaacctgcagccaaagataaagatgcgattgctgccgctctggcgcgggtgaaagagaaacaggcccaggctacacagcctattgtgattaaagcgggcgaacgcccggataacagtgcaattattgcagcacgggaagcccgtaaagcgcaagccagagcgaaacaggcagaactgcagcaaactaacgacgcagcaaccgttgctgatccacgtaaaactgccgttgaagcagctatcgcccgcgccaaagcgcgcaagctggaacagcaacaggctaatgcggaaccagaacaacaggtcgatccgcgcaaagccgccgtcgaagccgctattgcccgtgccaaagcgcgcaagctggaacagcaacaggctaatgcggaaccagaagaacaggtcgatccgcgcaaagccgccgtcgaagccgctattgcccgtgccaaagcacgcaagctggaacagcaacaggctaatgccgagccagaacaacaggtcgatccgcgcaaagccgccgtcgaagccgctattgcccgagccaaagcgcgcaaacgggaacagcaaccggctaatgcggagccagaagaacaggttgatccgcgcaaagctgccgtcgaagcggctattgcacgcgccaaagcacgcaagctggaacagcaacaggctaatgcggtaccagaagaacaggttgatccgcgcaaagcggcagttgccgcggctattgcccgcgctcaggccaaaaaagccgcccagcagaaggttgtaaacgaggactaaatggtattcagaatagctagctccccttatacccataaccagcgccagacaagccgcattatgctgttggtgttgctcgcagccgtgccaggaatcgcagcgcaactgtggttttttggttggggtactctcgttcagatcctgttggcaagcgttagtgctctgttagccgaagctctcgtactcaaactacgcaagcagagcgtagccgcaacgttgaaagataacagtgcattgctgacaggcttattgctggcggtaagtattccccccctcgcgccatggtggatggtcgtgctgggtacggtgtttgcggtgatcatcgctaaacagttgtatggcggtctgggacaaaacccgtttaatccggcaatgattggttatgtggtcttactgatctccttccccgtgcagatgaccagctggttaccgccacatgaaattgcggtcaacatccctggttttatcgacgccatccaggttatttttagcggtcataccgccagtggtggtgatatgaacacactacgcttaggtattgatggcattagtcaggcgacaccgctggatacatttaaaacctctgtccgtgccggtcatagcgttgaacagattatgcaatatccgatctacagcggtattctggcgggcgctggttggcaatgggtaaatctcgcctggctggctggcggcgtatggttgctatggcagaaagcgattcgctggcatattcccctcagcttcttagtaacgctggcgttatgcgcaatgttgggctggttgttcagtccagaaacactggcagcaccgcaaattcatctgctgtctggagcgaccatgctcggcgcattctttattttgactgacccggttaccgcttctacgaccaatcgtggtcgtcttattttcggcgcgcttgcgggcttattagtctggttgatccgcagtttcggcggctatcctgacggcgtggcttttgccgtcctgctggcgaacatcacggttcctctgatcgattactacacgcgtccgcgcgtctacggccatcgcaaagggtaaaccatgctgaaaactatccgaaaacacggcattacgttggcgctatttgcagcgggtagtacagggttaactgcggccatcaaccagatgaccaaaacgacgattgctgaacaggccagtctgcaacaaaaggcgttatttgatcaggtgctgccagccgaacgctataacaatgcgctggcacagagttgctatctggtaactgcgccagagttaggtaaaggtgagcatcgggtttacatcgccaaacaggatgacaaaccggtagccgccgttctggaagcaaccgcgccagatggctattccggtgcgattcagctgctggtgggagccgattttaacggcacggtacttggcacgcgcgtgacagagcaccacgaaacgccagggcttggcgataaaatcgaactgcgcctttctgactggatcacccattttgcgggtaaaaaaatcagtggtgcagatgatgcgcactgggcggtgaagaaagatggtggtgatttcgaccagttcaccggcgcgacgattactccccgcgcggtggttaatgcggtaaaacgcgccggattgtacgctcagacgttaccggcacaactttctcaacttcctgcctgtggagaataaagcgtgagcgaaattaaagacgttattgttcaggggttgtggaaaaacaactctgcgctggtccagttgctcggcctttgtcctctgttggcggtcacgtccactgccactaacgctctgggtttaggacttgcgactacgctggtactgacgctgaccaacctgaccattagcacgctgcgtcactggacgccagccgagatccgcattcccatttacgtgatgatcatcgccagcgtggtcagcgctgtacagatgctgatcaacgcctacgcctttggcctgtatcaaagtttagggatttttattccgctgattgtcactaactgtatcgttgtgggccgcgctgaagccttcgccgccaaaaaaggtccggcgcttagcgcactggacggctttagtattggtatgggcgcaacctgcgccatgttcgtgctgggtagtctacgcgaaattatcggcaatggcacattgtttgacggtgcagatgcgctgttaggtagctgggcaaaagtattacgcgtggagattttccacaccgactcccctttcctgctggcgatgctgccaccaggtgcatttattggcctgggactgatgctggcaggaaaatacctgattgatgaaagaatgaaaaagcgccgtgctgaagcagctgcagaacgtgcattgccaaacggtgaaacagggaatgtctgatgaataaagcaaaacgcctggagatcctcactcgcctgcgtgagaacaatcctcatcccaccaccgagcttaatttcagtagcccttttgaattgctgattgccgtactgctttccgctcaggcgaccgatgtcagtgttaataaggcgacggcgaaactctacccggtggcgaatacgcctgcagcgatgcttgaactgggcgttgaaggggtgaaaacctatatcaaaacgattgggctttataacagcaaagcagaaaatatcatcaaaacctgccgtatcttgctggagcagcataatggcgaggttccggaagatcgtgctgcgcttgaagccctgcccggcgtaggtcgtaaaacagccaacgtcgtattaaacactgcattcggctggccgactattgctgtcgacacgcacattttccgcgtttgtaatcgtactcaatttgcgccggggaaaaacgtcgaacaggtagaagaaaagctactgaaagtggttccagcagagtttaaagtcgactgccaccattggttgatcctgcacgggcgttatacctgcattgcccgcaagccccgctgtggctcttgtattattgaagatctttgtgaatacaaagagaaagttgacatctgaagaaaaggggtaacaccgattaccccattgataacctttctttatcctcttttaaaacatctttttaacgtcaatgatgccattgcttagcgttatcatcaggtaatccgtttgcggataaccaaaaatgcaggttaattgtttttttaatagcgaaattttctattcattcgtgatcaagatcacgatgctgtcgcaatgtaaaaacattgcaagaatcaggttaaaatcatttaaatttacacacgcaacaaatattgacctacaaaacattacactggctatttttcagaaactggactatctcactagtaaaaacgctaaatagcagaacatatcgccgttaagccatcacccccctctcagtgcagtgaaaaaatctgccgttacgttttttgaaaaatttaacgctggataacatttcccggaatggttgaattccccgcctcagttatatgtaacagattattacaaaggacttgtctgaaagtgcaagatagtgaacattacctgccgtttcccctcccactataacaattgcgcgtatgttttttatacataacgcgagaaagcacccccgttaatatgggatgtaaaaaaagaggtaaaagtgtccactgcaaaccaaaaaccaactgaaagcgtcagtttgaacgctttcaaacaaccgaaggcgttctatctcatcttcagcattgagttatgggaacgttttggttattacggcctacaaggaattatggctgtttacctggttaaacaactgggtatgtctgaagcggatagtatcacccttttctcttcctttagtgccctggtttatggtctggtcgctatcggcggctggttaggtgacaaggtactgggtactaaacgcgtaattatgctcggcgctattgtgctggcgattggttatgctctggttgcctggtctggtcacgacgccggtatcgtttatatgggtatggcggctattgcggtcggtaacggcctgtttaaagctaacccgtcttctctgctttctacatgctatgagaaaaacgacccgcgtctggacggtgcattcaccatgtactacatgtccgtcaacatcggctctttcttctctatgattgctacgccgtggctggccgcgaaatacggctggagtgttgcgtttgcgttgagcgttgtaggcctgctgatcactatcgttaacttcgccttctgccaacgctgggttaaacagtacggtagtaaaccagacttcgagcctatcaactaccgtaacctgctgctgaccattattggtgttgtggcactgatcgctatcgccacctggctgctgcacaatcaggaagttgcgcgtatggcgctgggcgttgttgccttcggtatcgtggttatcttcggtaaagaagccttcgcgatgaaaggtgctgcgcgtcgtaaaatgatcgttgccttcatcctgatgctcgaagccattatcttcttcgtgctgtacagccagatgccaacgagtctgaacttctttgcgattcgtaacgttgagcactccattctgggtctggccgtagaacctgagcagtatcaggcactgaacccgttctggatcatcatcggtagtccgattctggccgctatctataacaagatgggcgataccctgccgatgccaaccaagtttgcaatcggcatggtgatgtgttctggtgcgttcctgattctgccgctgggtgcgaaattcgcgtctgacgctggtatcgtgtctgtaagctggctggtcgcaagctatggcctgcagagcatcggggaactgatgatctctggtctgggtctggcaatggttgctcaactcgttccgcagcgtctgatgggcttcattatgggtagctggttcctgaccactgccggtgcaaacctgattggtggttatgttgcgggtatgatggctgtgccggataacgttaccgatccgctgatgagtctggaagtctatggtcgcgtattcttgcagattggtgtcgctactgccgttattgcagtactgatgctgctgaccgcgccgaaactgcaccgcatgacgcaggatgacgctgcagacaaagcggcgaaagcagccgtagcgtaaaattcagggaaactcttttacaagccgctaacttttcgttagcggctttttttttgttcagcaacgcactaccatactttaaaccacagacaaaaggagttaccgatgaaattgttctacaaaccgggtgcctgctctctcgcttcccatatcaccctgcgtgagagcggaaaggattttaccctcgtcagtgtggatttaatgaaaaaacgtctcgaaaacggtgacgattactttgccgttaaccctaaggggcaggtgcctgcattgctgctggatgacggtactttgctgacggaaggcgtagcgattatgcagtatcttgccgacagcgtccccgaccgccagttgctggcaccggtaaacagtatttcccgctataaaaccatcgaatggctgaattacatcgccaccgagctgcataaaggtttcacacctctgtttcgccctgatacaccggaagagtacaaaccgacagttcgcgcgcagctggagaagaagctgcaatatgtgaacgaggcactgaaggatgagcactggatctgcgggcaaagatttacaattgctgatgcctatctgtttacggttctgcgctgggcatacgcggtgaaactgaatctggaagggttagagcacattgcagcatttatgcaacgtatggctgaacgtccggaagtacaagacgcgctgagtgcggaaggcttaaagtaatagccatcggcccacaggtcgttgtgggccgaaatgagatatttcagagctttgttgcgctgaagtaatgttctggtttggcaatacgatcctgagcagccaccacttgcagctcatattcctgcattgctttggtggtcaccatgatttcgtagactgcagcggtcacatgttccagcgcctcctgcagcgttgccccctgaagcagtttcaccagcagtaaaccgctcgtcacatcaccaacacctaccggctggcgcataccaaaatccaccagcggacggctgatatgccaggcttcatcggcggtgaccagcagcatttcaaaacggtcacggctgtagccagctcgcgccaggtgtttaaccaacacaatttgtggcccttgcgcaatgagttcgcgcgctgccagaaccgcttcttcgacgttatttaccgcatgctcacagagtatttccagctcaaccagatttggcgcaatgatatcgctggcaggcaaaccgtgccgcacatgaaactctgcgacacccggtgcaacgatacagcctttttccggatgacccattaccggatcgcaaaaatatttcgcctgcggattcgcggctttcacctgacggacgataccgaggatatgttcaccctgctccgcgcttcccagatagccacttaatacggcatcacaggtgtgtaatttatcaatggcggcaatgccttgcacaatttcggttaaatggctgggcggcatcacgcagccagtccatttgccgtattgggtgtgattagaaaattgaacggtgttcagcggccagacgttcgcgcccaggcggcgcatcggaaactctgccgcactgttacccgcatgaccataaacaacgtgagactggatagcgagaatatttttcatcatgttccctgtataaaaaccagggggagtgatttctcactccccctttccacttaatgcattatttccagcaaatcagacagtaattctttttaccgcgacgcagtaaggtaaaacgaccaaacagacgatcttcttctttaaagaagtattcaggatcggactgtttttcaccgttaatggtgatggcattggaggcgatagttttacgtgcctgaccacgggaaggttgcagttcagaatcgaccagtgcctgcatcaggtctgcgcccttttccatctcaaccatcggtacgccgtcctgcgccagctgttcgaagtccgcttcactcagcgcactcaaagaaccgctgaacaggcattcggtaatacgttttgccgcctgtaaaccttcttcaccgtgaaccagacgagtcacctgctccgccagtacatactgggcgcgcggtgctttaccgctgtttttatcttcttcttccagggcgttgatctcttcaatgctcataaaggtgaagaacttcaggaagcggtaaacgtcggcatccgcagtgttgatccagaactggtagaatttgtacgggctggttttcttcggatccaaccagactgcgccgccttcagttttaccaaatttggtgccatctgctttagtgatcagcggaacggtcaggccaaacacctgattctgatgcagacgacgggtcaggtcgataccagaagtgatgttaccccactggtcagaaccaccaatttgcagcaccacaccgtactgtttgttcagacaggcgaagtcataaccctgcaacaggttgtaggaaaactcagtgaagctaatcccctgatcttcacggttgagacgctgcttaaccgcttctttgttgatcatctggttaacggagaagtgtttgccaatatcgcgcaggaaggtcagcacattcatattgccgaaccagtcatagttgttcgccgcgatagcagagttttctccacagtcgaaatcgaggaacggggcaacctgcttacggattttgtccacccactcctgaacagtttcttcggtgttcagcttacgctcggcagctttgaagctcgggtcgccaatcagacccgtcgcgccgcctaccagcgcaaccggcttgtggcccgcctgctggaagcgtttcaggcataacaatggaacaagatgccccaaatgcaagctgtcagcggtaggatcgaagccgcaatagagcgcgatcgggccttgcgccagtcgctctgctaacgcttcctcgtccgtcacctgggctaccagcccccgctcttgcaattgtttaatcaagttactgcttgccatcaaaatctccatgtatataacgactgcacctttgccggtacacgacttttcgccagatgcgaaagagacatagaataaagtgccagaatcaggagtaccagcgattaaagcaagatttttgcatcttttcagggtgcaagacgatcaatcttccacgcatcattttcacgctggtacaaaaagcggtcatgcaggcgatgctcaccaccctgccagaactcaatctgttcaaggctgacgcgaaaaccgccccaaaagctcggcaatggcacttcgccctgttgaaacttctgcttcagctccaggaatttactttcaaggataccgcgggcagaaatgcgactggactgcttgctaacccatgcaccaatctggctatcacgcgggcggctatgaaaatatttcatcacttcgagagtgctaagtcgttctgctttaccgatcaccatcacctggcgctcaagggtatgccacgggaacagcaggctaacgcgcggattattttcgatttgatgtgctttacggctgccgaggttggtgtaaaacaccatgcctttttcgtcgtaatgtttgagtaaaacgatgcgctgataaggctgaccatgttcatccacggtagcgaccaccatcgcggtagggtccgccagtttggcttcacaagcctgagagagccaacgttcaaaaagggttaatggatcggcgggaagatcgcggcggcgtaacccgcctttggtgtattcacggcgcagatgcgcgatttgctgcaattcgtcgttatcagacatggttttctttacggattgtcagtgggtgacgctattgtgcgccgcccctggaaaaatctcaacgctgtggattttgtaactgacagttattcaagacgatgcggtcgcgtttatagacagtcgcttcatcgcctttgctccagaaaacatagattccgtcagtgtaacgcgcgccagaggcactaatgccctgtttgagatgcagtagttgattatcgtaaacaaaactgacctcctggcgcggattattcagtttgaccgtcaacggtttttcatcacactggtattccagcgtatcggtttgcatgcgctcaaccagctgattaaaggcgctacagccggagagaaggaccggcaaaatgataattaacagttttttcatagtcatatcccgaagactttcctggtctggagggcaatacgccctccctaacgttccaagtgtaacggcagacgcggtaagaaaaattcagttaactctgatatcacgggttagcggggaaaatagcccccagtaccgtctcctggcttgcgccagtgacggaaggcagatttcctggtaatcccgccagcgtccgccaggcaagccaggcgaaagccaatgcttccatgtcatcgccactaatgccaacggcatcggtggtggtgacttctgtgcctggcagtaatgccgccagacgcgccatgagtagcggattacgactacctccaccacataccatcaatcgttcgcagccaccgctcaacaaaacttgttcagaaatggtcacggcggtgagttctgccagtgtcgcctgcacatctcggggatcaacacccggaaaatggcgcaaatggcgctccagccaaccatagttaaagtattcgcgtccggtgcttttcggtgcaggttggctgaaatacgggtcgctgagcatattttgcagcagtgggagaataactttacccgcccgtgcccactcggcatctttatcgtaaggtttaccggcctgacgccagatccaggcatccatcagcatgttaccaggaccggtatcgtagcccccaaccggctgcccaggaatgagcagactcagattggcgatgccgccaatattgagcaccattcgtcgctcggttgggtgagccagcagcgcatgatggaacgcaggtaccagcggtgcgccttgtcctcccaaggcaatatcgcgacggcgaaaatcaccgacaaccgtaattccggtgcgtgccacaatttgattgttatcgccaatctgtaaagtgtgtggtgccacgcccgtcggttcatgccagacggtttgaccgtgacaaccgatcgcaactatatctcttgcctgcagattttgttccttaagcaaggcattgaccgcatcagcaaaaagttgcccgagttgagtatcaagctgtccaaactggctaagtgtaagctgctggccctggcaaatatccagtacagcctgtttcagagataccgggatcggccaactcaaacttgccagctgtgcgacccggtgttcatcaattgtcgccaacacaacatcaacaccatcaaggctggtgccactcataacgccaataaagcggccgcttttcatagttcatcctttttcaatctgacgtttgcgcaccactcaaacataaacttttcgtgaataccatgcggaatgaccgatttttaccgttggtagtaaaacattatcttcaaatcaataatcatcatgaatgttttgtttataattggttgatcctactttcattatgatttgctcatatttggtagaacatgtaaccatggattcacatatgccatatactttgaccatgagggatgcttgcgtggcgtttcatggtgaacaggagatttttcaatgattaaacgcgtattggttgttagtatggtaggtctgtctcttgtcggttgtgttaataacgacaccctgagtggggatgtttataccgcttctgaagcgaaacaagtacagaatgtcagctatggcaccatcgttaacgtacgtccggtacagattcagggcggtgatgattccaacgttatcggtgcaattggcggtgctgttcttggtggtttcctggggaatactgttggtggcggaaccgggcgttctctggctactgcagcaggcgctgttgcaggtggcgtagctggtcagggcgtacagagtgcaatgaacaaaacgcagggtgtcgagctggaaattcgtaaagacgatggtaataccatcatggtggtacagaaacaaggcaacactcgtttctctccgggccaacgtgtcgtactggccagcaatggcagtcaggtgaccgtttctccgcgctaaataagtttgcgtgtggtcaggttactgaccacacgcccccttcatttcaccctttggcctgtaactcaatgatattatgctcaagttttgcgatgagcgtaatcagttgctccagttcctctgcggagatgccatgtaatatttccgcgcgggttttgttaataacagcttccatttcgctgatcagcggctctgccttttccgtcagtttaatacgtttagcccgacgatcgctggcacaagtttgacggctaattaaccctttttcttccagttggtccagagtacggaccagacttggctgctcgatgccaatcgcttttgccagttgaatttggctctggtctggaggtaactgatggatattgtgtaacgtaacccaatgggtttgtgttaactccagcggtttcaggcgatggtctatcagagcacgccatatgcgcaccaaccgtgccagatcagaacctagtgggctttccaatttcatctccttataattagcttgctaagatattatgcggcttttagaatagtgtgcagcaattgtattgctaaaacaaatgtattgctgcatttggttaccgtcagacatatttttcagaaattgcgcgtaaatttttcgcacttaaagaatatttattaatctaacgcaatatattcggtcgtaaaggaatctactttgtgaagtttatgctcaatgcaacaggattgcccttacaagatctggtgttcggtgcgtccgtctactttcctccgtttttcaaagcattcgcgtttggattcgtcatctggcttgtcgtacaccgcctgcttcgtggctggatctacgccggtgacatctggcatcccttgttaatggatttaagcctgtttgcgatttgcgtttgccttgctctggcaatactgattgcgtggtaactatgagtattaaaacaattaagtatttcagtacaatcattgtagcggtagttgcggttcttgccggatggtggctgtggaattattacatgcaatctccgtggacacgcgacgggaaaatacgcgcagaacaggtttctatcaccccacaggtgagcggacgtattgttgagctgaatataaaagacaaccagctggttaacgcgggggatcttctgctcacgatcgataaaacgccctttcagatcgccgagctgaacgcacaggctcagctggcgaaagcgcaatctgacctcgcaaaagccaataacgaagcgaatcgtcgtcgtcatctcagtcaaaattttatttctgccgaagaactcgataccgctaacctcaatgttaaagcgatgcaggccagtgttgatgccgcacaggcgacgctgaaacaggcacaatggcaactggcgcaaacggaaattcgcgccccggtgagtggatgggtgactaaccttactacccgcatcggcgattacgctgataccgggaaaccgctgtttgcccttgtcgacagccacagcttttacgtcattggttattttgaagaaaccaagttgcgccatatccgcgaaggtgcaccagcacaaattaccctctatagtgataacaaaacgttacagggtcacgtttccagtatcggtcgggcgatttatgatcagagcgttgaaagtgacagtagccttattccggatgttaaacctaacgtcccctgggttcgactcgcccaacgcgttcccgtccgctttgcgctggataaagtcccaggcgatgtcacgttggtgagcggcaccacctgtagcattgccgtaggtcaataatgaacgcaagcagttggtccttgcgcaatttgccctggttcagggccacgctggcgcaatggcgttatgcgttacgcaataccattgccatgtgtctggcgctgacggttgcctattatttaaatctggatgaaccctattgggcgatgaccagcgctgcagtggttagctttcccaccgttggcggtgttatcagcaaaagcctcggacgcatcgctggcagtttgctcggagccattgcggcactgcttcttgccgggcatacgctcaatgagccgtggttttttctattgagcatgagcgcgtggcttggcttttgtacctgggcctgtgcgcacttcacgaataacgtcgcgtatgcatttcaactggcgggctacacggctgccatcatcgcctttccgatggttaatattactgaggccagccagctgtgggatatcgctcaggcgcgcgtttgcgaggtaatagtcggtattttgtgcggcggcatgatgatgatgatcctgccgagcagttccgatgctactgcccttttaaccgcattgaaaaacatgcacgcccgattactggaacatgccagtttactctggcagcctgaaacaaccgatgccattcgtgcagcacatgaaggggtgattgggcagatactgaccatgaatttgctgcgtatccaggctttctggagccactatcgttttcgccagcaaaacgcgcgccttaatgcgctgctccaccagcaattacgtatgaccagtgtcatctccagcctgcgacgtatgttgctcaactggcccagtccgccaggtgccacacgagaaattctcgaacagttgctgacggcgctcgccagtagccaaacagatgtttacaccgtcgcacgtattatcgccccgctacgcccgaccaacgtcgccgactatcggcacgtcgccttctggcagcgactacgttatttttgccgcctttatctgcaaagtagtcaggaattacatcgtctgcaaagcggtgtagatgatcataccagactcccacggacatccggcctggctcgtcataccgataacgccgaagctatgtggagcgggctgcgtacattttgtacgttgatgatgattggcgcatggagtattgctagccaatgggatgccggtgccaatgcattaacgctggcagcaattagctgcgtactctactccgccgtcgcagcaccgtttaagagcttgagtcttctgatgcgcacgctggtgttacttagcctattcagctttgtggtcaaatttggtctgatggtccagattagcgatctgtggcaatttttactgtttctctttccactgctggcgacaatgcagcttcttaaattgcagatgccaaaatttgccgcattgtgggggcaactgattgtttttatgggttcttttatcgctgtcactaatcccccggtgtatgattttgctgattttcttaacgataatctggcaaaaatcgttggcgtcgcgttggcgtggttagcgttcgccattctgcgtccaggaagcgatgctcgtaaaagccgccgccatattcgcgcgctgcgccgggattttgtcgatcagctaagccgccatccaacactgagtgaaagcgaatttgaaagcctcacttatcatcacgtcagtcagttgagtaacagccaggatgcgctggctcgccgttggttattacgctggggtgtagtgctgctgaactgttctcatgttgtctggcaattgcgcgactgggaaagccgttccgatccgttaagccgagtacgggataactgtattagtctgttgcggggagtgatgagtgagcgtggcgttcagcaaaaaagtctggcggccacacttgaagaattacagcggatttgcgacagccttgcccgtcatcatcaacctgccgcccgtgagctggcggcaattgtctggcggctgtactgcagccttagccaacttgagcaagcaccaccgcaaggtacgctggcctcttaattacttaattacaccacaggcatagcgttcaccgccaccgcccagcggtttaggttgatcggacatattatcgccgccaacgtggaccatcagcgctttgtctttgatttcatccagacttttcagacgaggcgcgatgacggcatcggtagctttgccgtcattattgacgaccagtgcaggcagatcgcctaaatgcccggcaccttctggcccttcatgtttaccggtattttgtggatcaagatgcccgcctgcggattccgcggcgctggctttgccatctttggtggctggctggcagcttcctttggcatgaatatggaagccatgttcaccggggggtaatgctttcagatcggggctaaactccagacctttatcggtttcagtaatggtgacgctaccaatactctgccctaccccttggctcgtgacgaggttcatctcgactttttcactggcagcttgtgcgccggttgcaacaaccagcgccagaatagccagactaaaacgtttcataggacctccgttcattgtgcattcctgaataagtgtaaaccagtgacacatttttgaacggcggctattcctaaaagtgcttacggtacgtcgtaccccagtgccgctttacggatacgaaaccattgttgacgggtcattttcagtgtttctgcttcgacagctgcccgtacgcgctcaattttaccactaccgataattggcagcggctggcttggtaaacgtaatacccaggcgtaaaccacctgttcaatgctgcccgcgtttaactcctctgccaccacagccagttcatcacgcagcggctggaaataatcatcattaaacagacgaccaccaccaaggcaggaccacgccatcggacgaacacgcagttgttgtagttggtcgagcgtgccatccagcagtaacggctgatgcaccggggatatttccacctgattagtggcaagggtaaacggcagacgactttgcaacagggcaaattgcgcaggcgtaaagttgcttacgccaaaatgacgcactttgccgctctgatgcagatgtttgaacgcgtccgccacttcatcggcatccattaacgggtctggtcggtggattaacagcaaatccagatgatcggtcgcgagattaattaggctctgttcggcgctcttaatgatgtgatcgcggtcagtgatgtaatgaccaatgacgttttcttcacgcgcggtcgtcgcgataccgcatttactgacgatttccatccgttcacgcaggtgaggtgccagtttcagtgcctcgccaaacgccgcttcgcactgatagccaccataaatatcagcatggtccacggtggtcacgccgagatccagatgctcttcaataaaactgaccagctggcgggcggacatattccagtccatcaatcgccagtagcccatcacaaaacgggaaaactccgggccttgcggcgcaatagtaatacgctgaaccataatcgcttcctcttatcagatatgagaggagtatacgcaagattaggttcaaaagagacttggttgctccggttcgtcactactcgctggcttatttgcgcgtaatttgcgcattaatcgctgccgacaaaggcgcagcacctcttgtttttcgccatcgctcattttattccagttaaaacgctcatcacgactacgaaaacagccgcgacaaaacccgcgttcgtcagactggcaaattccccggcacgggctctggacgggaaagaactctaattgctccgccacttcgccctcctcagataagattattaccattattgaagctgttaatgtccaaagtagcaactttgcttgcactagaccgactggtctactacactccaacgcatgaacaaacacaccgaacatgatactcgcgaacatctcctggcgacgggcgagcaactttgcctgcaacgtggattcaccgggatggggctaagcgaattactaaaaaccgctgaagtgccgaaagggtccttctatcactactttcgctctaaagaagcgtttggcgttgccatgcttgagcgtcattacgccgcatatcaccagcgactgactgagttgctgcaatccggcgaaggtaactaccgcgaccgcatactggcttattaccagcaaacactgaaccagttttgccaacatggaaccatcagtggttgcctgacagtaaaactctctgccgaagtgtgcgatctgagtgaagatatgcgcagcgcgatggataaaggtgctcgcggcgtgatcgccctgctctctcaggcgctggaaaatggccgtgagaaccattgtttaaccttttgtggcgaaccgctgcaacaggcacaagtgctttacgcactgtggcttggcgcgaatctgcaggccaaaattagccgcagtttcgagccactggaaaacgcgctggcccatgtaaaaaacattattgcgacgcctgccgtttaacaggcattttttatcaccagacgaccgggagcctttatgagttctgaaaaactgtattccccactgaaagtgggcgcgatcacggcggcaaaccgtatttttatggcaccgctgacgcgtctgcgcagtattgaaccgggtgacattcctaccccgttgatggcggaatactatcgccaacgtgccagtgccggtttgattattagtgaagccacgcaaatttctgcccaggcaaaaggatatgcaggtgcgcctggcatccatagtccggagcaaattgccgcatggaaaaaaatcaccgctggcgttcatgctgaaaatggtcatatggccgtgcagctgtggcacaccggacgcatttctcacgccagcctgcaacctggcggtcaggcaccggtagcgcctagtgcacttagcgcgggaacacgtacttctctgcgcgatgaaaatggtcaggcgatccgtgttgaaacatccatgccgcgtgcgcttgaactggaagagattccaggtatcgtcaatgatttccgtcaggccattgctaacgcgcgtgaagccggttttgatctggtagagctccactctgctcacggttatttgctgcatcagttcctttctccttctagtaaccatcgtaccgatcagtacggcggcagcgtggaaaatcgcgcacgtttggtactggaagtggtcgatgccgggattgaagaatggggtgccgatcgcattggcattcgcgttagtccaatcggtactttccagaacacagataacggcccgaatgaagaagccgatgcactgtatctgattgaacaactgggtaaacgcggcattgcttatctgcatatgagtgaaccagattgggcggggggtgaaccgtatactgatgcgttccgcgaaaaagtacgcgcccgtttccacggtccgattatcggcgcaggtgcatacacagtagaaaaagctgaaacgctgatcggcaaagggttaattgatgcggtggcatttggtcgtgactggattgcgaacccggatctggtcgcccgcttgcagcgcaaagctgagcttaacccacagcgtgccgaaagtttctacggtggcggcgcggaaggctataccgattacccgacgttgtaatccaacattgcgagcggcgtaaagccgccgctatactaaaacaacattttgaatctgttagccattttgaggataaaaagatgcgtcttcttcataccatgctgcgcgttggcgatttgcaacgctccatcgatttttataccaaagtgctgggcatgaaactgctgcgtaccagcgaaaacccggaatacaaatacagtctggcgtttgttggctacggcccggaaaccgaagaagcggtgattgaactgacctacaactggggcgtggataaatacgaactcggcactgcttatggtcacatcgcgcttagcgtagataacgccgctgaagcgtgcgaaaaaatccgtcaaaacgggggtaacgtgacccgtgaagcgggtccggtaaaaggcggtactacggttatcgcgtttgtggaagatccggacggttacaaaattgagttaatcgaagagaaagacgccggtcgcggtctgggcaactaatctcctgccgggcgtgaactcatcgcgcccgcatctttactgcatcgacaagtaatatttgtcataatgcgcgctgcaatttatccgtattaagagaatcagatgtccgataacgctcaacttaccggtctgtgcgaccgttttcgtggtttttatcctgttgtgatcgatgttgaaacagccggatttaacgccaaaaccgatgcgctgcttgagattgccgccatcaccctgaaaatggatgaacaaggctggctgatgccggacaccacattacatttccacgtcgaaccatttgtcggcgcaaatttgcaaccagaagccctcgccttcaacggcattgacccgaacgatcccgatcgcggcgcggtcagcgaatacgaggcgctgcacgaaatttttaaagttgtacgtaaaggtattaaagcgagcggctgtaaccgcgccattatggtggcgcacaatgccaattttgatcacagctttatgatggccgccgcagaacgcgccagtctgaaacgtaacccgttccaccctttcgccacttttgacactgctgcactggccgggctggcactcggacaaaccgtattgagtaaggcttgccagaccgctggcatggacttcgacagcacccaggcgcactccgcgctgtacgacaccgaacgcactgctgtgctgttttgtgaaatcgtcaaccgctggaaacgtctgggaggctggccgctatctgccgccgaagaggtgtaatcgagtcgatgcctgatgacatgcaatgattcaggcatctatagtgaggctattccacgcatcctgcatgatattcacggggaatagcgttaatggcagataatccagaccctagtagcctcctgccggacgtgtttagtccggcgacccgcgactggtttcttcgcgcctttaaacagccgaccgctgtccagccgcaaacctggcatgtggcggcgcgaagcgaacatgcgctggtgattgcaccgaccggctccgggaaaacgctggcagcatttctctacgccctcgatcggctcttccgcgaaggcggcgaagatacccgcgaggcgcataagcgtaaaaccagtcgcatcctctatattagtccgataaaagccctgggcaccgacgttcagcgcaacttgcagatcccgttgaagggtattgccgatgaacggcggcggcgcggcgaaacggaagtcaatcttcgcgtagggatccgtactggcgatacgcctgcacaggaacgcagcaaactcacccgtaatccgccggatattctgatcaccacacccgaaagtctctatctgatgctgacctcccgcgcgcgcgaaacgctacgcggcgtcgaaacggtaattattgatgaagtccacgcggtagcgggcagtaaacgtggtgcgcatctggcgttaagtctggagcggctcgatgcgctgctccacaccagtgcacagcgaattggcctttctgccactgtgcgcagtgccagcgatgtggcagcatttcttggtggcgatcgcccggttacggtagtcaacccgcccgcaatgcgccatccgcagatacgaattgtcgtaccggtcgccaatatggatgatgtcagtagcgtcgccagcggcaccggcgaagacagccatgccggccgggaaggctccatctggccatatattgaaacgggtatccttgatgaagtgttgcgccatcgcagcaccattgtctttactaatagccgggggctggcggaaaaactgacggcacgattaaatgagctttacgccgcacgcttacagcgttccccgtctatcgccgttgatgcggcccatttcgagagcacctccggcgcaacctctaaccgtgtacaaagtagcgacgtttttattgcccgcagtcaccacggctccgtctctaaagaacaacgagcaatcaccgaacaggcgctgaaaagcggtgaattacgctgcgtggtcgcaacctccagtcttgaactggggattgatatgggcgcggtggatctggtgattcaggtggcaacgccgctttctgttgccagtgggttacaacgcattggtcgcgccggacatcaggttggcggtgtatctaaagggctgtttttcccccgtacccggcgtgatttagtcgattccgcagtcattgtagagtgtatgttcgcaggcaggctggaaaacctgacaccaccgcataatcctctcgacgtccttgcgcagcaaaccgttgccgccgcggcgatggatgcattacaggtagacgaatggtactcccgcgtacgccgtgccgcaccgtggaaagatctgccaagacgtgtttttgacgccacgctggatatgctttccgggcgctatccctctggcgatttttctgcttttcgccccaaactggtctggaacagggagaccgggatattgaccgcccgacctggcgctcaattgttggcggttaccagcggcggcaccattccggatcgtggcatgtatagcgtgttattacccgaaggtgaagaaaaggccggtagccggcgggtgggtgaactggatgaggagatggtatatgagagccgggtgaacgacattatcactctcggcgctaccagttggcggatccagcaaatcacccgcgatcaggtgattgtgactcctgctccgggtcgttctgcccggctccccttctggcgtggtgaaggtaacggacgtccggctgaattaggcgagatgatcggcgattttcttcatttgctggcggatggcgcgttcttttccgggactattcccccgtggctggcagaagaaaatacgatcgccaatattcaggggttgattgaggagcagcgcaacgcgacgggcatcgttccggggagtcgccatctggtcctcgaacggtgccgtgatgaaattggtgactggcgtattattttgcactctccctatggaagacgggtgcatgaaccctgggcggtggcgattgccgggcgaatacatgcgctatggggcgctgacgcgagcgtggtcgccagtgatgacggcattgttgcacgtattcctgacaccgatggtaaattgcccgatgccgcgatttttttgtttgaaccagaaaagttgctgcaaattgtccgcgaggcggtaggcagcagcgcacttttcgccgcccgttttcgcgaatgcgccgcgcgggcattattaatgccggggcgcactccgggccatcgcaccccgctttggcaacaacggctgcgcgccagtcagttgctggaaatcgctcagggatatccggattttccggtcattctcgaaaccctacgcgaatgtctgcaagatgtttatgatcttcccgcactggaacgtttgatgcgtcgcctgaacggtggcgaaattcaaatatccgatgtaacgaccactacgcccagccctttcgccacaagtttattgttcggctatgtcgcggaatttatgtaccagagcgacgccccgctggcagagcgccgggcatccgtactgagcctggacagcgagttactgcgcaatctactcggacaggtcgatccgggggaattactcgacccgcaggtcattcgccaggtggaagaagagttgcaacgactggctcctggcagaagagcgaaaggtgaagaaggattgttcgacctgctgcgcgaactggggccaatgaccgttgaagacctggcgcaacggcatacaggcagcagtgaagaggttgcgagctatctggaaaatcttcttgcagtaaaacgaatcttcccagcgatgattagcggacaggagcgtcttgcctgtatggatgatgccgccaggctgcgtgatgccctcggcgtacgactaccagagagtttgccagagatttatttacatagagtcagttacccgcttcgcgacctctttctgcgctatctccgggctcatgctctggtcacggctgaacaactggctcatgagtttagtctcggtattgccattgtcgaagagcagcttcagcaactgcgtgaacagggtctggtgatgaatctgcaacaagacatctgggtgagcgatgaagtatttcgtcgtctgcgtttgcgcagcctgcaagccgccagagaagcgacgcgtcccgttgcagccacgacctatgcgcgattgctgctggaacgtcagggcgtattacccgccaccgatggtagcccggcgctctttgccagtacaagcccaggcgtttatgagggcgtagatggcgtgatgcgggtgatcgaacagcttgccggagtcggtttacccgccagtctctgggaaagccagatcctgcctgcccgcgtacgcgactatagcagtgaaatgctcgatgaattactggcaaccggtgcggttatctggagcgggcaaaaaaaactgggtgaagatgacggcctggtggcactgcatctacaggaatatgctgcagaaagcttcactcccgccgaagcggatcaggcgaatcgtagcgcgctgcaacaagcgatagtcgctgttctggctgacggaggagcctggtttgcacaacaaatcagccaacggatacgcgacaaaatcggcgaaagcgttgatctctctgccctgcaagaggcgttatgggcgctggtctggcaaggcgtcatcaccagcgacatttgggcaccgttacgcgccctcacccgcagcagttccaacgcacgcaccagtactcgccgcagtcaccgggctcgtcgtggacgtcctgtctatgcgcaacccgtcagcccgcgggtatcttacaacacaccaaatctggctggacgctggagcttattgcaggtggagccactaaacgataccgaaaggatgctggcgctggcggaaaatatgctcgaccgctacggcatcatcagtcgtcaggcggtgatagccgaaaatatccctggcgggtttccaagcatgcaaacgctttgtcgaagtatggaagactccgggcgaattatgcgaggtcgttttgtagaaggtctgggtggcgcgcaattcgctgaacgtctgactattgaccgattgcgcgatctggcgacacaagccacgcaaacgcgccactatacaccagtggcgctctctgccaacgatccggctaatgtgtggggaaatcttctgccctggcctgcacatccggcaacgctggttccaacgcgtcgggcgggtgcgctggtggtcgtttctggcggcaaattgttactctatctggcgcaaggtggcaaaaaaatgctggtctggcaggaaaaagaggaattactcgccccagaggttttccacgcgctgactaccgcactgcgtcgcgaaccacggctgcgctttacgctaacagaagtgaatgatctaccggtccggcaaacgccgatgtttacgctgctgcgtgaggcgggatttagtagtagcccacaagggctggattggggataaagaaaggactgacggatgcccgttcgcatccgtcagtattgcaggacggattattccgcgtccggctcttcagacttgtatttagcggcagtttctttgatcagctgctgcagttcgccacgctgatacatttcgatcacgatatcacaaccgccgaccagctcgccgtcaacccacagttgcgggaaggtcggccagttagcatatttcggcagttccgcacgaatgtccggattctgcagaatatcaacataggcaaaacgttcgccacatgcggcaagcgcctggactgcctgggcagagaaaccgcagctcggcagtttcggactacctttcatgtacagcaggatcgggttttcagcaatctggcgttggattttttcgatagtggtgctcattgtcttgcttcctcaaacttctttacggcagtaatctgacattgtagcgggtcagtgcggcatcggaaaataacattttcatcacgcttttgctattttatccctttgctctatttgttgcatttcaaatattcgtttcttctctgatgccggcaaactggcgtatttataaccatttttagctttcactgctgcatttttttgcgctcgccaacgaaacgtattttttaacaataaaagctattaactttctcttcttctatgcattagaatcatcaagttttgtaaatcagacgcaggcatgatagacctgcctttacagagggacgctcagtggcgcggataaaccgtattagcatcacgctctgtgctttactttttaccaccctgcctttaacgcctatggcccatgctagtaagcaagccagggagagttctgctaccactcatatcaccaaaaaagcagataaaaagaaaagcacggcaaccaccaaaaagacccagaaaacagcgaaaaaagccgccagtaaaagtacgaccaaaagcaaaaccgcttcttccgttaaaaaatcttccattaccgcttctaaaaacgccaaaactcgcagcaaacacgccgtcaataaaacggccagtgccagctttaccgaaaagtgtaccaaacgtaagggctataaaagccattgtgtgaaagtcaaaaatgccgcgagtggaactcttgccgacgcgcacaaagcgaaggtgcaaaaagctacgaaagtggcaatgaataaactgatgcagcaaattggtaagccatatcgttggggtggcagcagtccgcgtaccggttttgattgcagcggcctggtttattacgcttataaagatttggtgaaaattcgtattccgcgtacggcgaatgaaatgtatcacctgcgtgatgcagcgccaatcgaacgtagtgaactgaaaaacggcgacctggtctttttccgtactcagggacgcggcacagccgatcatgtcggcgtgtatgtcggcaacggcaaatttattcagagtccgcgcacaggtcaggaaattcaaatcacttctctcagtgaagactactggcagcgccactatgttggcgctcgtcgggtaatgaccccaaaaacacttcgctaaaactttaccctgttgttacggcaacagggtaagttcatcttttgtctcaccttttaatttgctaccctatccatacgcacaataaggctattgtacgtatgcaaattaataataaaggagagtagcaatgagtttcgaattacctgcactaccatatgctaaagatgctctggcaccgcacatttctgcggaaaccatcgagtatcactacggcaagcaccatcagacttatgtcactaacctgaacaacctgattaaaggtaccgcgtttgaaggtaaaagtctggaagagattattcgcagctctgaaggtggcgtattcaacaacgcagctcaggtctggaaccatactttctactggaactgcctggcaccgaacgccggtggcgaaccgactggaaaagtcgctgaagctatcgccgcatcttttggcagctttgccgatttcaaagcgcagtttactgatgcagcgatcaaaaactttggttctggctggacctggctggtgaaaaacagcgatggcaaactggctatcgttagtacctctaacgcgggtactccgctgaccaccgatgcgactccgctgctgaccgttgatgtctgggaacacgcttattacatcgactatcgcaatgcacgtcctggctatctggagcacttctgggcgctggtgaactgggaattcgtagcgaaaaatctcgctgcataataactgatggcaaatgcagcattgcctgaagcgctacgcttatcaggcctacgcggatcatcgatgtaggtcggataaggcactcgccgcatccggcaagataaatcgcacgttgtcagcaactgtaacgcagaaggttatccttctgcgtttttgtttaattagctgttagcaacgcaaactgtttcaggttgttttctggcactcataaacaccagcaataatgccagtcccgcgacaatcgctcccatcaccggcacaaagctgtatcccagcccagcggaaattaccgcaccaccagcagctgctcccagcgcatttccaagattaaaggcaccaatattgacactactagacagacctggcgcttcactggcgacacgcatcacgcgcatctgtaacggcggtacgaccgcaaaggttgctgcgccccacaccaccatgctaatagctgcgccgaactcattgcgggccaggaacgggattgccagcataatcaccatcaacaacaacaaaaagcctttcaacgtgccgttaacactacgatctgccagtttgccgccgagatagttaccgatagagaatccgacaccaatcagcaccagcattgccgtgacgaacaccggtgttgcgtgggtaatactttgcagtaccggagagatataggtgtagagagtaaacattgcaccagctcccagtaccgtcgtcagcaatgcagacagcacctgcggacgcattaataccgccagctcttttttcacttcaggtcgtgcccctgcaccacctttaggtaaactgaagaacagacttaccatactaatcactcccagccccgccgttgccagaaaactcatccgccagccgatggtttcacccaaccaggtcgccgccggcacgccaccgatatttgccagggttaaccccataaacatagtggcaactgcgctggcctgtttatgttttggcaccacgcttgcggccacgacactacccaaaccaaaaaatgctccgtgattcaggctggtcaaaatgcgactaagcatcagggtcatataatccggcgcgatggcggaaagtacgttgccgagcgtgaaaattgccatcaggaaaatcaacgcactgcggcgggcacgatgagaaagtagaagcgtcatcagcggcgcgccaaccattacgccaactgcataggcactgattaacattccggcagcgggaatgctgacatccacaccgcgcgcaatgacgggcaacaagcccattgggctgaactccgttgtcccgataccaaacgcgccaatcgccagcgccagcaacggatagttaattttcatgccttatctccacctcttcgcgtcattacgcgatattcattaaagtggcgaaagcatgacagcaatcacaaaaaaatgaaaataacaaaaagagaaaacacttttgccattttgctaacaaacaggaaggagatgcgagggagaacgcgctccctcgagaggaaatcagtgcagcgcggcagtcaaacccacggctacgatcaaaccgaggacgataatcgttgttaccagtgaaaatttaaggtcggtgctcatcaagttttctccttttttattaccacacaaaaagtgatattacgcatttttacacactgtgatgaaaaaatctcccgtcatttataatgataagtgtttttaccacttccccttttcgtcaagatcggccaaaattccacgcttacactatttgcgtactggccattgaccccttcctgacgctccgtgtcgtttttccggcgtaccgcaacacttttgttgtgcgtaaggtgtgtaaaggcaaacgtttaccttgcgattttgcaggagctgaagttagggtctggagtgaaatggaatggcaacaataaaagatgtagcgaaacgagcaaacgtttccactacaactgtgagtcacgtgatcaacaaaacacgtttcgtcgctgaagaaacgcgcaacgccgtgtgggcagcgattaaagaattacactactcccctagcgcggtggcgcgtagcctgaaggttaaccacaccaagtctatcggtttgctggcgaccagcagcgaagcggcctattttgccgagatcattgaagcagttgaaaaaaattgcttccagaaaggttacaccctgattctgggcaatgcgtggaacaatcttgagaaacagcgggcttatctgagcatgatggcgcaaaaacgcgtcgatggtctgctggtgatgtgttctgagtacccagagccgttgctggcgatgctggaagagtatcgccatatcccaatggtggtcatggactggggtgaagcaaaagctgacttcaccgatgcggtcattgataacgcgttcgaaggcggctacatggccgggcgttatctgattgaacgcggtcaccgcgaaatcggcgtcatccccggcccgctggaacgtaacaccggcgcaggccgccttgccggttttatgaaggcgatggaagaagcgatgatcaaggtgccggaaagctggattgtgcagggtgactttgaacctgaatccggttatcgcgccatgcagcaaatcctgagccagccgcatcgccctactgccgtcttctgtggtggcgatatcatggcaatgggcgcactttgtgctgctgatgaaatgggcctgcgcgtcccgcaggatgttagcctgatcggttatgataacgtgcgcaacgcgcgctattttacgccggcgctgaccacgatccatcagccaaaagatagcctgggtgaaacagcgttcaacatgctgttggatcgtatcgtcaacaaacgtgaagaaccgcagtctattgaagtgcatccgcgcttgattgaacgccgctccgtggctgacggcccgttccgcgactatcgtcgttaatcacccgttgcgggagtctcttccggctcccgcagccactccttattcagcgtctcactatcgccgagatactcaagcaaccaggttaacgcagggctcatatcattttgctgccatgtcagacaacatgcgctatccggaaaggggttttccagttctaatgctacccacttcccctcattaagccacggtttggcgaaatgtgttggcaccatccctatgcataatcctgcgctgatacaggttgcgctactttcccagtcaggcacgacaactcttttttggttatccagcaaccaggtaatacgtttaggtagcgttcggctggtgtcttcgcgcaccaagctcggccagttgcgcaacgtatcatcgctgaacgggccatccatcaacgccagcgggtggtgactggcaacaacgcaactccagcttagcatccccatatcccggaaggcataacgaccgcctaccggaatcgcgcgtgttgcgccaatcgccagttccacgcgcccgtcggaaagcgcatcccagacaccgttgaacacttcctgaaagacaagaagttcgacatcatcaaaatggcgataaaaatcaacgatcatctgccgtgtacgttctggcctgacaatattatccactgcgatagctaactgaccgcgccagccgttcgctatctgctgacattgctggcgggtgatctgcatttttttgacaacagagcgcccttctttgagaaaccacgctccagcagcggtcagctccacatcacggtgccgtcgttcaaagagcggcaccgccagccactcttccagctgacgcacggtatagctgaccgcagaaggaacgcgatgcagctcctgtgccgcagcgctaaaactaccattacgcgctaccgcatcaacaacttcgagactatattcactccacatagtctgcctgcaaaatttttgaaaccagtcatcaaatattaccgtttcacaacactaatttcactccctacactttgcggcggtgtttaattgagagatttagagaatatacatgcaacctgggaaaagatttttagtctggctggcgggtttgagcgtactcggttttctggcaaccgatatgtatctgcctgctttcgccgccatacaggccgacctgcaaacgcctgcgtctgctgtcagtgccagccttagtctgttccttgccggttttgccgcagcccagcttctgtgggggccgctctccgaccgttatggtcgtaaaccggtattattaatcggcctgacaatttttgcgttaggtagtctggggatgctgtgggtagaaaacgccgctacgctgctggtattgcgttttgtacaggctgtgggtgtctgcgccgcggcggttatctggcaagcattagtgacagattattatcctagtcagaaagttaaccgtatttttgcggccatcatgccgctggtgggtctatctccggcactggctcctctgttaggaagctggctgctggtccatttttcctggcaggcgattttcgccaccctgtttgccattaccgtggtgctgattctgcctattttctggctcaaacccacgacgaaggcccgtaacaatagtcaggatggtctgacctttaccgacctgctacgttctaaaacctatcgcggcaacgtgctgatatacgcagcctgtagtgccagtttttttgcatggctgaccggtagtccgttcatccttagtgaaatgggctacagcccggcagttattggtttaagttatgtcccgcaaactatcgcgtttctgattggtggttatggctgtcgcgccgcgctgcagaaatggcaaggcaagcagttattaccgtggttgctggtgctgtttgctgtcagcgtcattgcgacctgggctgcgggcttcattagccatgtgagcctggtcgaaatcctgatcccattctgtgtgatggcgattgccaatggcgcgatctaccctattgttgtcgcccaggcgctgcgtcccttcccacacgcaactggtcgcgccgcagcgttgcagaacactcttcaactgggtctgtgcttcctcgcaagtctggtagtttcctggctgatcagtatcagcacgccattgctcaccaccaccagcgtgatgttaagtacagtagtgctggtcgcgctgggttacatgatgcaacgttgtgaagaagttggctgccagaatcatggcaatgccgaagtcgctcatagcgaaagtcactgatctatatcgatatacttatacttaggctgctaacaaaattttgttgtatgattgaaattagcggcctatactaatttcgagttgttaaagctacgataaatattatgtttttacggggacaggatcgttcccgactcactatggatagtcatttcggcaagggttcctcctttccctctgttctacgtcggattatagactcgcggttttttctgcgagatttctcacaaagcccaaaaagcgtctacgctgttttaaggttctgatcaccgaccagtgatggagaaactatgagtagtagctgtatagaagaagtcagtgtaccggatgacaactggtaccgtatcgccaacgaattacttagccgtgccggtatagccattaacggttctgccccggcggatattcgtgtgaaaaaccccgatttttttaaacgcgttctgcaagaaggctctttggggttaggcgaaagttatatggatggctggtgggaatgtgaccgactggatatgttttttagcaaagtcttacgcgcaggtctcgagaaccaactcccccatcatttcaaagacacgctgcgtattgccggcgctcgtctcttcaatctgcagagtaaaaaacgtgcctggatagtcggcaaagagcattacgatttgggtaatgacttgttcagccgcatgcttgatcccttcatgcaatattcctgcgcttactggaaagatgccgataatctggaatctgcccagcaggcgaagctcaaaatgatttgtgaaaaattgcagttaaaaccagggatgcgcgtactggatattggctgcggctggggcggactggcacactacatggcatctaattatgacgtaagcgtggtgggcgtcaccatttctgccgaacagcaaaaaatggctcaggaacgctgtgaaggcctggatgtcaccattttgctgcaagattatcgtgacctgaacgaccagtttgatcgtattgtttctgtggggatgttcgagcacgtcggaccgaaaaattacgatacctattttgcggtggtggatcgtaatttgaaaccggaaggcatattcctgctccatactatcggtagcaaaaaaaccgatctgaatgttgatccctggattaataaatatatttttccgaacggttgcctgccctctgtacgccagattgctcagtccagcgaaccccactttgtgatggaagactggcataacttcggtgctgattacgatactacgttgatggcgtggtatgaacgattcctcgccgcatggccagaaattgcggataactatagtgaacgctttaaacgaatgtttacctattatctgaatgcctgtgcaggtgctttccgcgcccgtgatattcagctctggcaggtcgtgttcagtcgcggtgttgaaaacggccttcgagtggctcgctaaaggctattctatcgccccctctccgggggcgatttcagatcaggcttctgtgcctggttgattcatggcattttctcgtgccgccagcacacgttctaccgtatctaccactgcctgagtttgtggatcgatttcaatgttgacgcgtgcgccaagttttttcttcccaagagtcgtgcgttccagtgtttcccgaattaaatggacgcaaaaacgcgttggcgtgacttcgccgacggtcaggctaataccgtcgatgccaataaatcctttgtacagaatatatttcatcaactgactatcctggactttaaaccagatctggcgattattttcactggttaatattttcgccacttcagcagtggtcataatatgaccactcattaagtgtccgccaatttcatcactgaatttcgccgcacgctcaacgtttacccaatcccccacttttaaatcgccaagattggtaatgcgtaacgtttctttcatcaggtcaaaactgacatggttgccgttaatttccgtcacggtcaggcagcaaccgttatgcgccacggaagcaccggtttccaggccgtccagcatgtggtcgggtaactccaccacatgcgtacgaaaatttggtttctcgtcaatgctcaccagttttgcggtgccctgtacaatccccgtaaacatacttacaactcctgaaatcagttaagacattctgttcagcacaatagcaggtggaaaacgcccttaccagtgaaggggtaagaatggctattttttcactggagaattaataaatcctcgctacaatagactgaatttcccctgcttcttctttttgctgcccattcaggcggctttttagtctctcatataactacaaataaaaggtgttcacgtgcagaagtatatcagtgaagcgcgtctgttattagcattagcaatcccggtgattctcgcgcaaatcgcccaaactgcgatgggttttgtcgataccgtgatggcgggcggctatagtgccaccgacatggcggcggtcgctatcggtacttctatctggcttccggcgatcctctttggtcacggactgctgctggcattaacgccggttatcgcgcaattaaatggttccggtcgacgtgagcgcattgcgcatcaggtgcgacaaggtttctggctggcaggttttgtttccgttctcattatgctggtgctgtggaatgcaggttacattatccgctccatggaaaacatcgatccggctctggcggacaaagccgtgggttatctgcgtgcgttgttgtggggcgcgccgggatatctgttcttccaggttgcccgtaaccagtgtgaaggtctggcaaaaaccaagccgggtatggtaatgggctttatcggcctgctggtgaacatcccggtgaactatatctttatttatggtcatttcggtatgcctgagctcggtggcgttggttgtggcgtggctactgcggcggtgtattgggtcatgttccttgccatggtttcttacattaaacgcgcccgctccatgcgcgatattcgtaacgaaaaaggcaccgcaaaacccgatcctgcggttatgaaacgactgattcaactcggtttgccgattgcgctggcactgttctttgaagtgacactgtttgccgtcgtggctctgttagtgtctccgctcggtattgttgatgtcgcaggacaccagattgccctgaactttagtagtctaatgttcgtgcttccaatgagcctggcggcagcggtaactatccgcgtaggttatcgtctgggtcagggcagtacgctggatgcgcaaaccgctgcgcggaccgggcttatggtgggtgtctgtatggcaaccctgacggccattttcacggttagtctgcgggagcaaatcgccctgttgtacaacgacaatcccgaggttgtaacgctggctgcgcatttgatgttgctggcggcggtatatcagatttctgacagtatccaggtgattggcagtgggattttgcgtggttataaagatacgcgttccattttctatattacctttacggcttactgggtgctgggcttgccaagcggctatattctggcactgaccgatctggtcgttgaacctatggggccagcaggcttctggataggctttattattggcctgacgagcgcagccattatgatgatgttgcgtatgcggttcctgcaacgtctgccgagtgccatcattctgcaacgagcatcccgctaataaagacaaggcgcaaccttcacgggttgcgcctgtatttttacgcaggctggagcgttgcgccaatcccgtcttcgtctggctgtaatttcagagcgttacacagagtttgccgactggcatctgttatctcaacgtgtatatccccggtaacttcccctttcacattgatgaagtcaggactaatttcttttgcactggtttgcaggcaaatcgctccctctccgcgcaggcgtttcactttcagttgcacatgcgttgccgcatcagtgatcagccacagttttccaccattcagattgatgttaccaacaatgaaagtgacactgtcaccttttaccgtactgccgtctagaatcaacacaccgccctgctgtacagtaatcgtactttgttgcagctctgcgccataaccaataatcatactagcgccgtccagtaatgcaacactcccggtcagttcaaccggtgcgcgatcttcctctacgacaaaattttcgtccgcgctggtgggactcaacaggatcactgtcccaccttgtattaccgcgttttccagcgtaccggcatgcacttcagcccgaccacccacattcacggacaggttttgcgtcttaccggaactgtagagctgaaggccatccgtccccagacgataaatggatccattctcaacaatagtgtcagagtcttcaccaccgagattattcatggtgccaccagcaagcaacgtatcactggctttcccggccagcataaaaacgccgccctgattaatctcacaattgctggcttccccacctggatacaccaacaattcaccaccttcatctaccacgaccgcactggttgtcccattaaccaacaggccgccctcttgatcgagaatgattttttccgcgcgatgtccttccagtacacgcaggttaccgccattttccagcaacaaaccgcaggcataacctttatcaacgctgaattcaccttcgggatggcggccattaaccgtagcgagcgtagagagactaattgcgcctccctcggactgaacaatatctgtggcaatggcaccatcgctgacgcttagcgtgccattgttaccgtactgtgtgcatttggcgatcccaccggttgccactttcaaccagccagcccccgtgaccacggtattttcggctcttccgccagcttcaacaatcaactcgccttcagtaagttgcgtcgcgccaatgacctcgccggtcttaacaatttgcacgttcccgtcgctcatcaagtttttcgcatcagatcccatgatttattcctttgctgcatctgtgtgcctttattgctacctaagtgtaaaggctacggaggatttatccacgacagatttgagatggtggcaaacaactctgtttaaactctgatacacgaattattgggttgtatcagatgtaaatgcgatcctgaataaaaatcacccttgcaaatcaacaaaatatagccaatttgcttaaaagctctgcaaacggtcgaaatagcgcagaaaattacgttttgcctcttgccaccttcccactctgccgctaatattcgtccccgttgtcacctacaacgttgcgttcatagctcagttggttagagcaccaccttgacatggtgggggtcgttggttcgagtccaattgaacgcaccatcctgcgtccgtagctcagttggttagagcaccaccttgacatggtgggggtcggtggttcgagtccactcggacgcaccagattttcttaatctggtcttctcctttttccctctgtttcttctctgtatccaatacgttaaaagatttacactgtcttcgtatgcgttatcagaaggagaatcgctatggcaactttgttacaacttcattttgcttttaatggcccatttggcgacgcaatggctgagcagcttaaaccacttgctgagagcattaatcaggaacctggttttctgtggaaggtatggacagaaagtgaaaagaaccacgaagccggtgggatctaccttttcactgatgaaaaaagcgcccttgcctatctggaaaaacatactgcccgactgaaaaatctcggcgttgaggaagttgtcgccaaagttttcgatgtcaatgagccacttagtcaaatcaatcaggcaaaactcgcctgacagaatttaatcaagggcggttagcgcccttttcatccctgtctgaaatttctcaaattctaaaaatctcaaccaaacttatctgataacactaaattcgaaagaatgcgtacaggtaagtaacaatgaaaaaaattgctattgtgggtgccgggcctacggggatctacaccttattcagccttctacagcaacaaactccactttctatttctatcttcgagcaggctgacgaggccggtgtcgggatgccatacagtgatgaggaaaacagtaaaatgatgctggcaaatattgccagtattgaaataccgccgatttattgtacgtatctcgaatggctacaaaagcaagaagacagccatctccagcgttatggcgttaaaaaagaaaccttgcacgatcgtcagtttttaccgcgaattctgctgggcgaatatttccgcgatcaatttttacgactagtagaccaggcacgacagcaaaaatttgcagtggctgtttatgaaagttgccaggttaccgatctgcaaattacaaatgctggcgtcatgctcgctacaaatcaggatttacccagcgagacgtttgatttagcggtgatcgccacgggtcacgtctggcctgatgaagaagaagcaacccgaacgtattttcccagcccgtggagtggcctgatggaagcaaaggtcgatgcgtgtaacgtgggtattatgggaacatccttgagcggactggatgcggcaatggcagtggctattcagcatggtagcttcattgaagatgataaacaacacgtcgtttttcaccgcgataacgcaagtgaaaagctaaatatcacgttgttgagccgcacgggtattttacccgaagccgatttctattgccctattccctacgagcccttacacatcgtcaccgatcaggcattaaatgctgagattcaaaaaggcgaagagggccttttggatcgggtatttagattgatagtagaggaaatcaagtttgctgatccagactggagtcaacgcatagccttagagagcctgaatgtcgattcctttgctcaagcctggtttgccgagcgcaaacaacgcgacccatttgactgggcagaaaaaaatctccaggaagtcgaacgcaataaacgagaaaaacatactgttccctggcgttatgtcattctgcgcctgcatgaagccgtacaggaaattgttccacatctgaatgaacacgaccataaacggttcagtaaaggccttgcccgggttttcatcgataattatgcggcaatccctagtgagtctattcgtcgcctacttgccttacgtgaagcgggaatcattcatattctcgccctcggtgaagactacaaaatggaaattaatgagagccgcaccgtcctgaaaacggaagacaacagctacagctttgacgtttttattgatgcccgcggacaacgtccgcttaaagtgaaagatatccctttccctgggctacgcgagcaattacagaaaacaggggatgaaatccctgatgttggcgaagattatacgttacagcaacccgaagatattcgtgggcgcgtagcgttcggcgcgttgccctggttgatgcacgaccagcctttcgttcagggacttacggcatgtgcagaaattggtgaggcgatggctcgggcggtcgtaaagcctgcatcccgtgctcgtcggcgtcttagctttgattaaaggtaaagctatcagcactcaacaaactgatgctgttcattaagacgatagcggactccggctcgaatattgttttcaccttcaatggcgacggcgaagcgaactctttcgccgtcatgatatgccagtgcggcgcttcctcctggcccgagaataatactgtcgaccacgcccgtgctcactaccgtactattttcaccgctggcaatgatgtgtacattgtcgccgctgttggcaattctggcgtttgcgccaaagctggcgatttgcaccaggtcaccattactggcgacatgacaccgttcacccaatgtacaaacgcgtactcgcattccggtattcgcaatccgactgctatctccagcgctgcttatccggctagaattaccggttacagcaacccgtgcgcgttcaccggagctgccaatgtgactgttaaagccgacacttccaatccgcacgctataacccatactggcaatttgcgcggcatacccagcggttgcgattctggcgttatcctcacaacagccgatgcgagcatgatcgtcgctgcgggcaaactgactgcaaaatggtctctctccggggtctgtggccagtttttgcatagaggaaacttcctgatgcgcgaagttttcatccgccagccattttttccacgcatactcaaccagactctccgcccagtccgtatatccttcctcaatcagtgcatgatgaatatcggcataactaccgccgcgtgggaaatggcgcaggaaccagcgatacatcaccgctccgatacgccattctcgcaggtctgcttgtgtaatgatcattcgttagtgccggtgatagccatcgaccatgcttttaaaggtttcgtgtggcgtacgccccgtggtgcaaagataaagatgaccgaagataaaaaagaggcttataaatgccagagcaaaatgtgtctgcaataaccagtatcttacgccaggaaacacatctcccacggcttgcggatagagacacagcagccccgtcaatagtaacaacggcagcaatccatacatgacaccaacataggcgacctgctgtaagggattaaatttagactgggttgttgccgggaaaggatgttcttccccctgcataatgccaaacaaataaaatcgcgtttgttttgccgctcgttccagccacccctgacgacgaatgcgatagtggtgaccattatccccaacggcattgatcagcacaaagccgagccagcatgccagtaacaaaaatccgcaaacttcatgcaccgcaaccagacttttaaccgcagttgcgcccaccatcgcaaagtgatttatcagcccactggccagcaacaatacaaagagtaacgcattgctccagtgccataatctgaccgctttgctgtaaagataaatcttctcaccatgatcggtggcacttttcttcacgccacgagcacgaagcaaggcatgcagccccagcaccaaccacatcccaaccagcaatactccggcaatgatcaaccacaccggccaaaattcgggagtgaactgtggcacatagttcgctaactggctctgaaactgttcagcatgttggctcgggttcatacattttcctttttaatcaaatgttgaccgaaccggcgatacagatgcggtttcccggcaccaggtagctgatattgatagtatttattttgctgcaaccacgcctgaatttctgggctatcttcgcgaccaaagatcaatgcgtgttccgggcaggcgctgacgcaaatgggcggaaagccttttgccagtcgggactcagcgcagaaatcacatttatctgccactttagtgacagggttaaggtagcgaacctggtacggacaagcgccaatgcaataactgcagccgatgcactggcttttttctacccgcacgatcccctgctcatcacgccagctcgcccccgtcgggcaaacgtcgatgcacggagcatcttcgcagtgctgacaactctggcgaaaaaagtgatactgcgtttcgttgtcgttatcggtgactggaatgtgtgctatgcttaaacggcttccctgagcggggacgtggttagttttacggcatgcgcgggcgcaaatattacagccattgcaccgactctcgtcatgaatcatggcataccgaacttccttttcttgcctcgtgttcgctaacagagaagacgcagaaccagtaaaaaagattactgttcccatccccagaacaaatttgcgtcgagtgaaggacatctgattatcccctaatgcagtggctgcaactgtccaccctatccatgacatctccctgaaatttcaggggttctgaaactgctctacctcgaaccattcgcataagccataagccttgccataggtcataaatcgctcgctaaacaagtacaacaccgccgtgctactctccacctgccgtatatcggcatattcaggtgcaacatccatcgcggcgatcgcggcttcaatctgcgcttcctggaagtaatatggcgcttgcatcagcatggcgactttgtaaggacgaggatacgtctggcactcaaaacgaacggcgtgtgcaatggcgcgacaaatgtcctgctccacaacttgcaaagacatcgccgcgtagttttcactcatggcctgcgtactgtaatagtaatcatccttgcttcccgtcaaacaagcgatatccgcgtagtctccgttctgcttaatgctttccagcaaaacactcagttcctcttctgcaaccaaatagggtgggctgagaaacacggcgcgcgccaccagctgcccagccgcagaatgctggcgaatgaactcagccaggatttcagcaggttctggttcggttaccgtatcaacggggtgacgcatcccctgcaaccattgccgcttcgcctcgtcaacttcgctgactttcgctaacggcaattcatcctgatggttcatcttacccattccttacgcaggcagtagattgtgtgctgccagatcggcggcaatatcttccagccccagacgctgcaatgtttcgcgggttggacaaccaagctgtgggtcccagcccatttctttgtagaacatcgtgaggctagcatgcatatcgtcacgatccattttgtcagtaccttcagtaaagaccgggatctgcggatccttgtcgaatacccaggaacagataagatcgtgttcattacgcatatctttggtttgcatcagttttaccgtgtaggcacgatgcaacgtaaaaatacgctctgcagctaaatctaatttttcctgagtcatctcttcgccggtgatcgctttgaagaatttggcttcaagcgccagatcgccccggtaattacggcttttcagcgggctaacggtcattggccagacccagttgcacagggtgacggcgttatgcaaacagacccgcaacaggctccactttgcatatttaatttttgcgtcattgattggcgtgtagtttttggtttcatcgtaagcatcttcagaaccaaaaagttctttcgccacttcacgttgcagtttcaatggcaagccggaaccaataaagttgatatgggtatgcgtcatgcagtcacggttgaacatacagttaacaatggaaccgacctgcgcactcgcttcattggcatggtgaaccggatagccaaacgggctccagagtttatttttcgcgtagccccagtactcttcacccaaattccagcgttctgcgatggcataactaccatcagccaggtgactcagctcacccacacgatgcgccagacggtagtaaaaatctttaatgaagttaacgtcacccgcttccagttgatcccagcgaatttctgcatactcttcagctggcagaacacgcttgaacacacctttgctgtaacaataagtaaagtcgcgatgcaactgcccgtagttacaccataggccgtagtcatcgaacaaattcagacccaccaggttaccaatcacacgaccatcgtctttatcttcaaaatctttcggcccgttcgggaagatggtggtatggacaaagtttgctacacaagtgttaccacctgtgctgggcacgccaaactctttcacccgaggaatattcatttgggtcatacaacggatcgggcaagagtggcagccgctcatttttactgtgtatttctctgccgccggtcctaagtcaaaaacggatttataggtacgaaagccgaccgtattctgattgcctggcggaatttcacccgtttcaatcggaccaccttcagccgcgccccaaaacagccctttacgtgctgtccagcgactcttgggatcactatactctgcccagctttgtggcgtacttggcacgacatggttgttattcgcaccaataagttcagtcatcatgtaatcattgagacgcttcatctcctgacgatcggcaatgttgacccctttcgtcccttcaaccgcaatcgctttcaggtttttgctacccattattgcgccagttcccgcaccgccgctgtggttacggctattcaacatgccagagagaggaacaaggttttccccagcctgaccaatagccgccacacaggtttccggactggtcaatcgacaaatttcttccgtcgttgcgcgcgtcccttttccccataagaaatcggctttttccaggctaactttgtcatctttaatcttcagccataccggacttttcgccttcccttcgataataatgacgtcgtatccagcgaatttcatttgcgctgcaaaaaagccacccatatgggcatcgacgactaaatttcctttggtaaaagtagaaagactggtgatatttacgcgagaactacagggggcaccagatccagttaatgggccggtagcaaagactaatttattcgcttcatcgaaaggtttcgtgcctggcggtacttcgtcatacataattttgtagccgaagcccatgccaccgacaaaacttttaaacttactggaatcttcgagggtaatatttcctgtcgtgagattgactcttaatatattacctgtccaaccgttagccatgattttttcctttgcaagattcacacagtaatatctttccactcgataatttttaacgcccctgttgggcaggcgtttgcgcattcaccgcataacacacatttgctggattttttactttcggtatttacggtggccatcatccacgggcatgccgtagtacaggcgctacagccaatacagcgtttatgatcgacggtaatacagccttctttctgctgccaggtaatcgcaccaatcgggcagacgttcatgcattgcggctctttgcattgacggcaggtgtccgcggtatagttgagatcgccatacaggccgccgccagagccaaccccgttgtcgccaaagaaataattgcgatggattttgatacgggagaagaatgtccctacactgccatcgttgaagttggtacaagagatttcacagcggtggcaacccgtgcatcgcgctcgctgggtcaccagcacccctttgggggtatttatcaaccctactgtgccgctatcaatatcttcctgtttgcaacccaaaagactcagtaacgcaggggcaattgttagaccagcaaggccttttccacttatacgcaagaattctaatcgcgttaagccaatatctaatagtggacgatcaaccgggttcatttatttcgcatcctcttcgcaaacacagtgctgacaattcagcagcctgatattaagcattcaactaatacgctgctgactctgtccccaacaccagatattttccctaacccgatagtgtatgagaaaagattaacgccgataaactaatcctttatggttaggagaaaaaataatgtgattattctgagcccttaacattgatcgttatcaattaaaattacaaagcaagaaattataagtgaactgatatttattatcatttgaaataaatttaacttaagcgacaattatttgtgactttcattgcagaaaataaaaataacattatcgctataaattaaaatacataccgaaattcgtataatttcagcagttgttatttagaatgattaactggaccgcaactgaagcaagaatatcaggatgaagcttaccgcctcatcctgaatggtcattttaccagtgcgttaatgacggtttccatcgcctgcttttccagctcactgcgctgaatgcgtttattggctaatgctgtacgtaatacgcctgcgataacaatatgctttggttcctgccccagatcgcgcatttccagcacaactttaccgacaactctgcacatttctcggtacagttcatcctcttttgtccgatttcccattctttatacctatttatcatgccaactatcagcatatatcaatctaaccaattaaacaaaaatcaaacaaaatcagacaaataacgcgataaattattttaactgtagcaattgagcgatgatatatttatacaccggatgaactttcacttatcctcacactgacaacttcggcaccagacgttgcgcaaacagtgaagtttttgcgtaaccttttccctggaacgttaaatctttgataacaatttattgtctaacaagttgtatattttttgaaacgctgtttttgttttccttttggattaatttcagcgtataatgcgcgccaattgactcttgaatggtttcagcactttggactgtagaactcaacgactcaaaaacaggcactcacgttgggctgagacacaagcacacattcctctgcacgctttttcgatgtcacctatccttagagcgaggcaccaccactttcgtaataccggattcgctttccggcagtgcgcccagaaagcaagtttctcccatccttctcaacttaaagactaagactgtcatgaaaaagaccaaaattgtttgcaccatcggaccgaaaaccgaatctgaagagatgttagctaaaatgctggacgctggcatgaacgttatgcgtctgaacttctctcatggtgactatgcagaacacggtcagcgcattcagaatctgcgcaacgtgatgagcaaaactggtaaaaccgccgctatcctgcttgataccaaaggtccggaaatccgcaccatgaaactggaaggcggtaacgacgtttctctgaaagctggtcagacctttactttcaccactgataaatctgttatcggcaacagcgaaatggttgcggtaacgtatgaaggtttcactactgacctgtctgttggcaacaccgtactggttgacgatggtctgatcggtatggaagttaccgccattgaaggtaacaaagttatctgtaaagtgctgaacaacggtgacctgggcgaaaacaaaggtgtgaacctgcctggcgtttccattgctctgccagcactggctgaaaaagacaaacaggacctgatctttggttgcgaacaaggcgtagactttgttgctgcttcctttattcgtaagcgttctgacgttatcgaaatccgtgagcacctgaaagcgcacggcggcgaaaacatccacatcatctccaaaatcgaaaaccaggaaggcctcaacaacttcgacgaaatcctcgaagcctctgacggcatcatggttgcgcgtggcgacctgggtgtagaaatcccggtagaagaagttatcttcgcccagaagatgatgatcgaaaaatgtatccgtgcacgtaaagtcgttatcactgcgacccagatgctggattccatgatcaaaaacccacgcccgactcgcgcagaagccggtgacgttgcaaacgccatcctcgacggtactgacgcagtgatgctgtctggtgaatccgcaaaaggtaaatacccgctggaagcggtttctatcatggcgaccatctgcgaacgtaccgaccgcgtgatgaacagccgtctcgagttcaacaatgacaaccgtaaactgcgcattaccgaagcggtatgccgtggtgccgttgaaactgctgaaaaactggatgctccgctgatcgtggttgctactcagggcggtaaatctgctcgcgcagtacgtaaatacttcccggatgccaccatcctggcactgaccaccaacgaaaaaacggctcatcagttggtactgagcaaaggcgttgtgccgcagcttgttaaagagatcacttctactgatgatttctaccgtctgggtaaagaactggctctgcagagcggtctggcacacaaaggtgacgttgtagttatggtttctggtgcactggtaccgagcggcactactaacaccgcatctgttcacgtcctgtaatattgcttttgtgaattaatttgtatatcgaagcgccctgatgggcgctttttttatttaatcgataaccagaagcaataaaaaatcaaatcggatttcactatataatctcactttatctaagatgaatccgatggaagcatcctgttttctctcaatttttttatctaaaacccagcgttcgatgcttctttgagcgaacgatcaaaaataagtgccttcccatcaaaaaaatattctcaacataaaaaactttgtgtaatacttgtaacgctacatggagattaactcaatctagagggtattaataatgaaagctactaaactggtactgggcgcggtaatcctgggttctactctgctggcaggttgctccagcaacgctaaaatcgatcagctgtcttctgacgttcagactctgaacgctaaagttgaccagctgagcaacgacgtgaacgcaatgcgttccgacgttcaggctgctaaagatgacgcagctcgtgctaaccagcgtctggacaacatggctactaaataccgcaagtaatagtacctgtgaagtgaaaaatggcgcacattgtgcgccattttttttgtctgccgtttaccgttactgcgtcacgcgtaacatattcccttgctctggttcaccattctgcgcactctctacactaggcgcattgctggctgcgggagttgctccactgctcacgctaaccggataccctgcccgacgatacaacgctttatcgactaacttctgatctacagccttattgtctttaaattgcgtaaagcctgctggcagtgtgtatggcattgtctgaacgttctgctgttcttctgcgcttagtggtcgatgtacttcaacataacgcatcccgttaggctccacggaatatttcaccggttcgttgatcactttcaccggcgttcccgtccgcacgctggagaacaaggctttaatatccggtgcattcatgcgaatacacccactactgacgcgcaaaccgacgctgtccggcgcactggtaccatgaatgaggtattcgccattaccatgcgcgaggcgcagtgcgtaacgtcctagcgggttatttggtccggcaggaacgactggcggtaatttaatgccacgctccaggctacgctgacgaatgcctgccgtaggcgtccaggttgggttagggattttctgcccaacacgcgtttccatcaccggcgtttccagcccctgcaatccaatacctattggataaacctgcacaatattttctcccggcggataataataaaggcgcagctctgcaaggttaacgataatcccctgacgcggtgcatcaggtaataacagttgactaggaatagttatcgtcgtaccaggttttggcaccggggcgatagtgttattggcttcaaggatcaacattgccgcagtatcaaaacgtcgggcaatagcctgaaggtttttatccccttcttgcaccgtatacgtttgattttgcccaaccagtcggcttccggttggtggtagcggataatcaaccgcccaggcagcctggatggcgctaaaagcgccgataagcgtgagtgtaagcaaagacgcgcgtttcattgtaaacctcctgtatttgccggagactcacgctgaaacgtcggatggcgcttatgttcacctgaaaccaaaacactcctgtgcaggtcagtgtaaacattgaccatccggcaatgtgagccaaccggatgaaagctgtccttttagtttagctaagtgcagcggctttggcgcgaattgcgcgaatcatcgcttccagaccttgactacgagatggggtgagatgttgggtgagcgccattttttcaaaccacggacgcacatcgaaattgacaatatcctgcggcgtcatctgatcgtagagaataaagacgaccgcaataagccctttcacaatcgccgcatcgctgtcgccctgtaattcaataattccctgggcattctggcgcatgacaatccacacctgactctgacagccctgaatgctattttgtggacttctgtcttcgtcgcgtaattctggcagacgctggcccagctcaataatgtagagatatttctcttcccagttggcgcagcgtaaaaaattacgcagcaacttttctttatccggcaataaagccatagtgcctccctgttatcccagcaaacggtgaatacgttgcaggccggtcaccagacgatccacttcttcatgggtgttatacatggccaggctcgcccgacacatcgcagggacgttgtaataggccatcaatggcattgcgcagtgatgtccggtacgcacagcaatgccgtaattatcgagaaaactgccaacatcataggcgtggtgtttaccgagattaaaagcaataacgccaagcctgttttgtgggccatagagagtgagatccggtacagattccagctgacttagcgcataatgcatcagattctgttcatactcggctatgttattaagccccagcgcgctaacatactccagcgccgcgccaagaccaatgatgcccccggtattgggtgtaccggcttcaaaccgccatggtgctttggtccaggtagtgccttcactcaggctgacggtggcgatcatagaaccgcccccttcccacggcggcatctcctgcaacaaggcttctttcacataaagaatgccaattccggtggggccatacagtttatgcccggagaacacgtaaaagtcgcaatccagcgcctgaacatccaccggatgatgcatcaccgcctgagcgccatccaccagcacttttgcgccatgctggtgcgcaagcgtgatcatttccgccagtggattttctgtgccaagcacgttggagacatgagtaattgccagcaggcgagttttctcatcaaacagcgtaggcagcgtctccagttgcaacgtaccatcgggattgagcgggatcacacgcagctctgcgccaacgcgtgcgcaaagcatctgccagggaacaatgttagcgtggtgctccatctgactgatgatgatgttatcgcccgcccgcacgttgctgttgccccagctattggcgaccagattgatcccttccgtcgtgccgcggacgaacaccagctcttccgcgctacgggcattaataaacaggcttgcccgcttgcgcacgttctccattttctcggtcgcctgggcgcttaaggtatgaataccacgatgcaccgccgcgtagccatgacgataaaactcggcctcggcgtcaatcacctggctcggtttctgcgcactggcggcgctgtcgagataagccagcggcaaaccgtttacctcacggctaagcaccggaaagtcggcccgcactttgtcgacggaaaaaatcatcttgcacctcctggcagccgttgaccgattcgggccagcacctgctgtttaagcccctcatcacgcagtgcttccgtcagttcggcagcgaaggcgtaaatgatcatctgctgggcatcctgctgattgatcccgcggctgcgcagatagaatatctgttcatcatcaatacgccccaccgtcgcgccgtggctgcatttcacatcatctgcatagatttccagctgcggtttcgtatccacttccgccagtttgcccatcagcagattgttgttggtcatctgaccatccgttttgatggcgtgctgcgcgacgttgatcaaaccgttaaataccgcgcggcctttgtcgctgacgatagttttgtgcaactgtcggctgttacaaaaacctttattgtgttccagccaggtacgggtatcacacacctcgtttttcaccggcatcgccaggctattgatccgcagcgtgctgttttcgccattgagttgcgtactggtgttgtgtcgtaacactgcgccacccagcaggaaactgtggctaaatgcggtggcatcctcagccagcaacaaatcgttatgagcaaagtggtgactgagcgggttttcaaacgccagcttgatatgctgcaagtgggcattcgctgcgacgttgatagtgaaccgtgccccggtaaaatgacgagcatcattcaggctgacaaaatgttcgatcaccgttgcttcggcaccttccgccagatccagatgatgtcggtaatgggcagtgttcacctcttcacctgccacgccctgggtgatatgcattaacagcaatggctttgccggccgttgaccgcgcttcacggcgatatgcgtcacgctttgtgccaggctttccgtcaaatgcagaaacacttccgcctgaatagcgtcgggtaaaccctgacggtcgtcgttaatgctcacttcatatccgctgccttcagttgcatcgctcagtgcgggcacgtaacgcccatcgacaaacaccagccgcacggagtctaacgttaacgctaaggcatcacgctgctgtggggatatctctcccgcaatgctgacaaactggctattgatcagcccttccagcggcgtatatttccagttttcatgtttacgtgtcggcagtccggtacgcagcaattgttgtaaatgctgctgtgcttgcggggagcgttttgtcccttcagcttcaaacaagtgatgccactgttgcagcgcgttactgctgttcggtaagccagccataaccctgctcctccagttgtttgaccaacgtgaaatcgccggatttcacaattcgtccctgatatagcacatgaacgtaatcaggcttgatgtagtcgagaatgcgttggtagtgcgtaacaatgatgaaactgcgcttgccatcacgcaggctgttcacgccatcggcgaccacttttaatgcgtcaatatccagcccggagtcgctctcatcaagaatgcataactccggttccagcaccgccatttgcaaaatatcgttgcgctttttctcgccgccggaaaaaccaacgtttacgctacgggttaataaatcttccggcatcttcaggagagcgattttctcttccatcaaatcctgaaaatcaaagcggtcgagcgtttcctggccgcgatagctgcgcaccgcattaagtgccgtttgcaggaaaaactggttactgacacctggaatctccaccggatactggaaggccataaagatgccttcgcccgcgcgatcttccgggctcagcgcaagcaaatctttgcctttgaactcaaccgtgccgcccgtcacttcataatcttctcgcccggcaagcgttgcgcttaaggtacttttgccgctaccgtttggccccataatggcgtgaacttcgccgggatgaacgtcgaggcttaatccgcgcaggatagctttatcttccacgctgacgtgtaaatctttaatacttaacatgtttattccttatccgacgctgtgttcaagactgatggcgaggagtttttgtgcttcaacggcaaattccaacggcagctcgctgaacacgtctttgcagaaaccgttaacaatcatgctgatggcgtcttcttcgctgatcccgcgttgcaggcagtaaaacagttgatcttcaccaatacgacttgtcgttgcctcgtgttccagttgcgcactattgttacgacactcaacatacgggaaggtatgcgccccacaattagcgccaatcagcatactgtcgcactgagtgaaattgcgcgcattggttgccgtcggcatgattttcactaagccgcgataactgttctgactatgtccggcagagatccctttgctgataatggtgcttttggtgtttttaccgatgtggatcatcttggtgccggtatccgcttgctgatgaccgctggtcagcgccacactgtaaaactcaccaatggagttatcgccgcgcaaaatgcagctgggatatttccacgtaatcgcactcccggtttcactttgcgtccaactcattttgctgttttcgccttcgcacaaagcacgcttggtgacgaagttgagaataccgccggtgttgttatcgccaggaaaccagttttgtaccgtggaatatttcacctcggcgtttttatggatgatgacttccaccactgccgcgtgtaactgatagctgtcacgcaccggagcggaacagccttcaatgtagctgacgtagctgtcttcgtcggccaccagaatggtgcgctcaaactgcccggttttttctgcgttaatgcgaaaataggtggaaagttccatcgggcagcgcacgcctttaggcacataaataaacgtaccatcagaggctaccgccgcattaagcgcggcaaagaagttgtcattccccggcaccacggtgccgagatatttacgcaccagttccgggtgatcgtggatcgcctcaccaaaggaacagaaaataattccctgctccgccagtttttcgcgataagtagtggcaacgctaacactgtcgaaaatggcatccaccgccacctctttgccttcccgcacgggaacgcccaactgctcaaacgccgcctccacctctttacttaaaaaggcgttcgcgccagtttgctgcaccgcgccaggttcagacgcgcaagtgtcgtcacaattaccgcagcttggtgcactgtagtagctgtaatcctgataattcagcttgtcgtagtgcgctttcaaccagtgcggttcttccatctccagccatgcgcgataggcgtttagacgaaactccagcatccactccggctcattacgcttcgcgctaattgcgcgcaccacctcttcgtttatcccctttgccagctcatcggtggctaactgggtgaagaatccttctttataattcagcgggccgccggtccaggttttgacatcgtcagttgcttcagtattacgagacatagtaccgcttataccccaaagctttcgccacagccacattcattctgggctttagggttgtgaaatttgaatatctgattaagtccttcacgaacgaaatcgacttccgtgccatcaataaacggcatcgcttgcagcgggacaaacagcttcgcgccgtcgtgttcaaacagcagatcgtctttgtccggctcgctaacactgtcgagcacatagccaaagcccgcgcagcccgtttgcttcacgcctaagcgcacgccgaccatacccggctgctttgccaccagctcacggatgtgtatcgccgctgcgggtgtcagcgttaagccttgccaggcgaaatcttgtgggttaaaggttccactatgcatgtccatcgatttacctcacttcatcgctttcagcgtataacagcatgttagtgataatgattatcagttcaacccagcaaacgcaggggctttaccgtaaaacatgctttttgcctgcttttaataagcatagaccctgatgtgtgggttaacaggcacgctaagaattaggtatctcattgttagataatggttattatctaaggagcattaaggctgtgatgaaaaagaaaaagttgtattgaaaatgactatttaagagataggtaaaaaagtgcagcgttcagaaataagaaaacccttaagtctgtgcgacacaggcttaagggtttctaccccatccggcgcttatctccggcactctcagtggcttagctcttgaaggggcgataagaataatctcataaagctaacccgccgttttaacacaaactgcgattagtattatttttgaacaatatcaggcggtagataagcagtattaagaaggtcatcgaacctggacggaggttaatccaggtcgatttggcgaacttgcggcattaagtcaggatcaatgcacgcccagacgccaggcaaagtagatttcttcttttaattcagcagaagagagagtaagcaggtcagcaaattcaagttctagttgtttcagacgtttgagatattgggcaggactaagattgctctggtcacggcgtaaaaattcaatggccagctgggtgggatcaagttgagtagacatagcatcctcgcttttagacaagacctgcacagtataccaccgtttactgtgcagataatgaccaaaagcaatatgcgtcacacttttctggtgacaacgtcacaaaatggcggtcgtcaatcgactgctacagcacaaacgccctttctcatcgaagatttcaatctgccagacctggtgacggctaccgagatgcaacggtttgcatacgccgcgcacccgcccttctcgtgcgctgcggacgtggttagcattgatttccagaccaaccactttttgctcaccttcggtacataaataaccggcaacggaaccgatactttcggccagtaccacggatgctcctccatgcagcaacccgaaaggctgctttgtccggctgtctactggcattgtcgcttcaagggtgtcatcaccaatatgttcaaagcgaatatccaggaaccccaccatgtttccttcacccatagcattcagtgcttccagggtgattttccgtttccatatcatttaataatctccagtaaagcctgcacaggatggcgtacccccgtgccttcaacccgttttacctggctacggcaggaatatccggtcgccagacagcggttacgcggcagtcgctgcatagcctgatgccaggataactcatagatcccgaggctattttcatggtttttcgcttcatgtccgtaagtccctgccatgccgcagcaacccacgctgacattttccagtttcgcgccaaaacgggcaaatatcgcggcccattgtgctggcgcacccggcaaggcggtaacttcggtacagtgaccaaagaaataccaactttcaccgctgactgtagccactggctgactctcaagtgcgcttgccagccattcattcgccagtaagacgttaaactcgccacgctcctcgcccagcgccagtttatattcatcgcgataacaaagtaccagcgccggatcgacgcccaccattggcatacccagcttcgccatacggttgaggaaatccgccgtctttttcgccgtcttcgcaaaacgattaagaaaacctttaatatgctgggctttgccatttgggctaaatggcagtaacacaggctggaaacctaatttttcgaccagacggacaaaatccgccaccacttgcgcatcgtaatagctggtaaaggggtcctgcaccaccaacactgtgcgcgctttctgctctgcattgagagattcaagctgttccagcgtcatgtttgcgctgcgatgccccaccatttgttgttgtaggctggggacgctcagcagcggcaaatcaaccatgccgatatgtttttcgctgagtttgcgcaccagcggctggttaatgaagaagttaaaggttttcggcgcgcgtgccatcagcggcgcgtagctctcgaccgtagcgacgaggtggtcgcgcagcgggcgtaaataacgggtgtgatagagctgcagaaaacgagagcgaaactccggcacatcaattttgatggggcactgggtgctacacgctttacaggccagacagccgctcatcgcctctttgacttcgtgactgaagtcatattcgcctttattcgcatgccagctattgcgcgtgcgggcaattaacgtccgcaaactgacgccggattcaggcagttcttgttccagtttgagtggatcaacgccgcgatccgccaacaaacgcagccattcacgcaccagcgttgcgcgccctttcggactatgaatccggttctgggtgatcttcatgctcggacacatcggactacgggcatcaaagttgaagcataaaccgttgccgttacactccatcgcaccgcgccactgctggcgtaccgcaatggggatctgccgatcgaatgtaccgcgcttcaccgcgtccactttcatcatcggcgcatcgagaccttctggcgggcaaatcttccctgggttgagtcggttatgcgggtcaaatgccgctttcactttgcgcagttctgcaaaaagttcctcaccgaaaaacgccgggctgtattcagcgcgaaaacctttgccgtgctcgccccacaacaaaccaccgtatttcgcagtcagcgccaccacgtcatcagagatttgcttcatcaaaatctcttgttgaggatcgcacatatccagcgctggacggacgtgcaagacacctgcgtcgacgtgaccgaacataccgtagcttaagccgtggctgtcgagcagcgcgcgaaattcagcaatataatccgccaggtgttccggcggtacgcaggtatcctcagcaaacggaattggcttagcggcacctttggcattgccaagcagaccaacggcttttttgcgcattgcatagatacgttcaacccccgccagctcacggcacacctgccagccgatgacacctgcttgatgactggcgatcagctcatccaaccgcgcacagagtgcatttacccgctcatcaatcagcgcctcatcatcaccagcaaattccacaatgttcagcccgagcatctcttggtcaggcacatcggtaatcaactcgctgacggaatgccagacaatatcttcccgcgccagattcagcactttactgtccaccgtctctacgctaagcgcccgcgcctcaaccataaacggcgcgttacgcagcgcagagtcaaaagagtcatatttgacgttcaccagacggcgcactttaggcaagcgtgtaatatccagccgcgcttcggtaataaaggccagcgtcccttcactacccgtcagaatgcgcgtcaggtcgaactcggtcatctcatcgttaaagacatgacgcagatcgtaaccggtaagaaagcggttaagtttggggaagttgtcgataattaactggcgttgctgacggcaacgttgataaaccgtgttataaattcgcccgattgtggtattggatttacccagcgtttccgccaattcgacgggtaaaggttgcgtatcgagaatatcgccccccaacaacaccgcgcgtacgccaagtacgtgatcactcgttttgccatagaccaggcttccctgaccggatgcatcggtattgatcatcccaccgagcgttgcccggttgctggtgctaagttccggcgcaaaaaagtagccgaacggtttcaggtactgattgagttgatcttttatcaccccggcctcaacgcgcacccagccctcttcagggttaatttcgatgatgcggttcatatggcgggacatatcaacaataatcccctggttgagcgcctgaccgttagtgccggtgccgccgccgcggggggtaaagatcaggctactatagcgttcctgcgcggcaagacgggcgatcagcgccacatctgcggtactacgcggaaataccaccgcatcggggagaagttggtaaatactgttgtcggtgctcattgtcagacgatcggcataacttgtcgccgtatcgccggtaaaaccttgttgctccagctcttgcaaaaaattaagcaccagttgaacgacgccgggtgcctgggaaatctgtggaatcattatattgaccctttcctgcggtctgtgatgtaggtcgatacactattctttcaggctgctgcaatagcgcactgaaaggtgatgtttgtttactctatggatttcgtgttgcaggaaggcggcaagcgagtgaactccaggagcttacaatagtaagtgactggggtgaacgaacgtagccgcagcacatgcaacttgaaatacgacgagtaaatcgtttgcgtgttgcctgagttgttgtaccacatttttttctaacacgcccatcagaattaagggcagaatcggcctgttaaaaaccgctgaaattgctcatcattatgcaggtgagtttcgcgtgttcacgtcgcgtcgacgatttgacgcacaaaaaaggtgaaaagtagttatggtaaatgttcgtcagcccagggatgtcgcacaaattctgcttagcgtgctgtttttagccatcatgattgtggcatgtctgtggattgttcaaccctttattctcggctttgcatgggccggtacggtggttatcgccacctggccggtattgttacgtttgcaaaagatcatgtttggccgccgctctctcgccgttctggtgatgacgctgttattagtgatggtgtttatcatccctattgctttgctggttaacagtatcgtcgacggcagcggcccgctaattaaagccatttccagcggtgacatgacgttacccgatctggcgtggcttaataccattccggtgattggcgcgaagctgtatgcaggctggcacaacttgctggatatgggggggacggcgatcatggcgaaagtccgcccttatattggcaccaccaccacctggttcgttgggcaggcggcgcatatcgggcgctttatggtgcattgtgcgctgatgcttctcttcagtgccctgctgtactggcgcggtgaacaggtggcacaaggcattcgccattttgcaacccgtctggcaggcgttcgcggagatgccgccgtgctgctggcggcacaggctatccgcgcggtggcgctgggtgtggtggtgacggcgttagtacaggcagtgcttggcggtatcggcctcgccgtatccggcgtaccttatgcaacgttgctaacggtgttaatgatcctctcctgccttgtccagcttggcccgttgccggtactgattccggcgattatctggctctactggactggcgataccacctggggaacggtattgttagtgtggagcggtgtggttggcacgctggataacgtcatccgcccaatgttaattcgcatgggtgccgatttaccgctgatcctgattctctctggcgttattggtggtttgattgctttcgggatgatcggtctgtttattggtccggttctgttagccgtttcctggcgtctgtttgccgcgtgggtggaagaagtcccgccgccgacggaccaaccggaagaaattctcgaagaacttggcgaaatcgagaaaccgaataagtaatttctcatcaggcggctctgccgcctgattgttaaccaccgctaattgatatttgcttgctcttccccatattttcctgcttaccgccattcagctggtagtacctgtcgcaaattctttacagtttttaaactaatgagacgaatctgatcgacgcaaaaagtccgtatgcctactattagctcacggttataaatcaacatattgatttataagcatggaaatcccctgagtgaaacaacgaattgctgtgtgtagtctttgcccatctcccacgatgggcttttttttaacatttttccgcttcgctacctcgcccctcactctttccaataatgttgcacaagatactgtgactctcttcaagccgtcagcaggctgataatgttatttatattttattgtttatttcatgcagccattacacgatgaacgcttatgaactccaggcactccgccatatttttgccatgactattgatgaatgcgcgacctggattgcccagaccggtgacagtgaaagctggcgtcagtgggaaaatggcaagtgtgccattcctgatcgtgtagtcgagcaactgttggctatgcgtcagcaaagaaaaaaacatcttcatgccatcatagagaaaataaataaccgcatcggcaacaacaccatgcgttttttccccgacttaaccgcatttcaacgagtctaccctgatggcaattttattgactggaagatctatcaaagcgtagctgctgaattatatgcacacgatctggagcggctttgttaatttttccacagaaaggaattgtcgttgttacaacaataatgaacggatgctgacacaacatcgcttcactttttaaagcacctttgctaagtagaacctatgaaaaatccctatttccctaccgcacttgggttgtattttaattacctggtgcatggtatgggcgtccttttgatgagcctgaatatggccagcctggagacactttggcagactaatgccgcgggtgtcagcatagttatcagtagcctgggcattggtcgattaagtgtcttgctttttgcaggattattatccgatcgctttggtcgccgcccttttatcatgctcgggatgtgctgctatatggccttcttttttggcatcctgcagaccaataacatcattatcgcttatgtttttggctttctggcgggaatggcaaacagttttctcgatgcaggcacttatcccagtttgatggaagcttttccacgcagtcctgggacagccaatattttaattaaagcatttgtttccagcggacaatttttattaccgctaatcattagcctgttagtgtgggctgaactgtggttcggttggtcctttatgattgctgcaggcattatgtttattaacgctctgtttttataccgttgtacgttcccaccccatccgggtcgtcgcttacctgtcataaagaaaaccaccagctctacggaacatcgctgtagtattatcgatttagccagttataccttatatggctatatcagtatggcaacgttttatctggttagccagtggctggcacagtacggacaatttgttgcaggcatgagttacactatgagcatcaaactactcagtatctacaccgtgggtagcctgctttgtgtatttattaccgctccactcattcgtaataccgttcgcccaacaacattactgatgctgtacacctttatcagttttattgctctgtttaccgtctgcctgcatcccacattttatgtggtgataatatttgcttttgtcattggttttacctctgctggaggtgttgtgcaaattggcctgacgttaatggctgaacgtttcccttacgctaaaggtaaagctacagggatctattacagtgcgggcagtattgcgacctttactattccgttgattacggctcatctgtcccaaagaagtattgccgatattatgtggttcgataccgccatcgctgccatcggttttttactggcactgtttatcggcttacgcagccgcaaaaaaacgcggcatcacagcctaaaggaaaatgtcgctccgggtgggtaatgcaatattcttttcaggtcatgcaagatcttacggataaataactctttctgcgctaactaaggaaaatcgcgatcaaaaacaaactatgacatgcaatattcctggaaacataaactttatgccatgtacccagggaaaatcatcttcagtatagtaattatgtaaaccgtcggagaacaatacgtacggtaacgaaattatctttcagcaaggagctgtgaaaatgtctcaaaataaggctttcagcacgccatttatcctggctgttctttgtatttacttcagctacttcctgcacggcattagtgttattacgcttgcccaaaatatgagttctctggcggaaaagttttccactgacaacgcgggcattgcctacttaatttccggtatcggtttggggcgattgatcagtattttattcttcggtgtgatctccgataagtttggtcgtcgggcggtgatattaatggcagtaataatgtatctgctattcttctttggtattcccgcttgcccgaatttaactctcgcctacggtctggcagtgtgcgtaggtatcgctaacagtgcgctggatacgggtggctaccccgcgctcatggaatgctttccgaaagcctctggtagcgcggtcatactggttaaagcgatggtgagttttgggcaaatgttctacccaatgctggtgagctatatgttgctcaataatatctggtacggctatgggctgattattccgggtattctatttgtactgatcacgctgatgctgttgaaaagcaaattccccagccagttggtggacgccagcgtaactaatgaattaccgcaaatgaacagcaaaccgttagtctggctggaaggtgttagtagcgtactgttcggtgtagccgcattcagcaccttttatgtgattgtggtgtggatgcccaaatatgcgatggcttttgctggtatgagtgaagctgaggcattaaaaaccatctcttattacagtatgggcagcttggtctgtgtctttatttttgccgcactactgaaaaaaatggtccggcccatctgggctaatgtatttaactctgcactggcaacaataacagcagccattatctacctgtacccttctccactggtgtgcaatgccggagcctttgttatcggtttcagtgcagctggcggcattttacagctcggcgttagcgtcatgagtgagttttttcccaaaagcaaagccaaagtcaccagtatttatatgatgatgggtggactggctaactttgttattccactgattaccggttatctgagcaacatcggcctgcaatatatcattgttctcgattttactttcgcgctgctggccctgattaccgcaattattgtttttatccgctattaccgcgttttcattattcctgaaaatgatgtgcggtttggcgagcgtaaattttgcacccggttaaacacaattaagcatagaggttaaaggagttaattatggatgttaccgcaaaatacgaattgattgggttgatggcctatcctatccgccacagtttaagccccgaaatgcagaataaagccttagaaaaagcgggattgccatttacctatatggccttcgaagtggataacgatagctttcctggagcaattgaaggattaaaagccctcaaaatgcgcggaactggtgtaagcatgccgaacaaacaactggcgtgtgaatatgttgatgaattaacaccagctgccaaactggtgggggccatcaacaccatcgttaatgatgatggctatctgcgtggctataacaccgacggcacgggccatattcgcgccattaaagagagcggttttgatatcaaaggcaaaacgatggtgctgttaggggccggtggtgccagtacggcaattggcgcgcagggggcaattgaaggtttaaaagaaattaaactctttaaccgtcgggatgagttcttcgataaagccctcgccttcgcgcagcgggttaatgaaaacaccgattgtgtcgtcacggtcaccgatctcgccgatcagcaagcctttgctgaagccctggcttccgccgacattttaaccaatggcacaaaagtgggtatgaaaccccttgagaatgaaagtttggttaatgatatcagtctgttacatccgggacttctggtcactgaatgcgtgtataacccgcatatgacgaagttattgcagcaggcgcaacaagctggttgcaaaacgattgatggatacggcatgttgttgtggcaaggggctgaacagttcacattatggactggcaaagatttccctctggaatatgttaaacaggtcatggggttcggtgcctgacaggctgaccgcgtgcagaaagggtaaaaaatgaaaaccgtaactgtaaaagatctcgtcattggtacgggcgcacctaaaatcatcgtcagcctgatggcgaaagatatcgccagcgtgaaatccgaagctctcgcctatcgtgaagcggactttgatattctggaatggcgtgtggaccactatgccgacctctccaatgtggagtctgtcatggcggcagcaaaaattctccgtgagaccatgccagaaaaaccgctgctgtttaccttccgcagtgccaaagaaggcggcgagcaggcgatttccaccgaggcttatattgcactcaatcgtgcagccatcgacagcggcctggttgatatgatcgatctggagttatttaccggtgatgatcaggttaaagaaaccgtcgcctacgcccacgcgcatgatgtgaaagtagtcatgtccaaccatgacttccataaaacgccggaagccgaagaaatcattgcccgtctgcgcaaaatgcaatccttcgacgccgatattcctaagattgcgctgatgccgcaaagtaccagcgatgtgctgacgttgcttgccgcgaccctggagatgcaggagcagtatgccgatcgtccaattatcacgatgagcatggcaaaaactggcgtaatttctcgtctggctggtgaagtatttggcagcgcggcaacttttggtgcggtaaaaaaagcgtctgcgccagggcaaatcagcgtaaatgatttgcgcacggtattaactattttacaccaggcataagcaataatatttcggcgggaacaccctccccgccgaactaaaaaatatattcaatcgtatttaataaaaatatttcgtgagtctctgtgcgctaattctccatttggcgtagggaaaatcacatctgaatcaggaattaacaatgaaacctgtaaaaccacctcgtattaatggacgagtgccggtcctgagcgcacaggaagcggtgaattatattcccgacgaagcaacactttgtgtgttaggcgctggcggcggtattctggaagccaccacgttaattactgctcttgctgataaatataaacagactcaaacaccacgtaatttaagcattattagtccaacagggcttggcgatcgcgccgaccgtggtattagtcctctggcgcaagaaggtctggtgaaatgggcattatgtggtcactggggacaaagcccgcgtatttctgaactcgcagaacaaaataaaattattgcttataactacccacaaggtgtacttacacaaaccttacgcgccgccgcagcccaccagcctggtattattagtgatattggcatcgggacatttgtcgatccacgccagcaaggcggcaaactgaatgaagtcactaaagaagacctgattaaactggtcgagtttgataacaaagaatatctctattacaaagcgattgcgccagatattgccttcattcgcgctaccacctgcgacagtgaaggctacgccacttttgaagatgaggtgatgtatctcgacgcattggttattgcccaggcggtgcacaataacggcggtattgtgatgatgcaggtgcagaaaatggttaagaaagccacgctgcatcctaaatctgtccgtattccgggttatctggtggatattgtggtggtcgatccggatcaaacccaactgtatggcggtgcaccggttaaccgctttatttctggtgacttcacccttgatgacagtaccaaacttagcctgcccctaaaccaacgtaaattagttgcgcggcgcgcattattcgaaatgcgtaaaggcgcggtggggaatgtcggcgtcggtattgctgacggcattggcctggtcgcccgagaagaaggttgtgctgatgactttattctgacggtagaaacaggtccgattggcggaattactagtcaggggatcgcctttggcgcgaacgtgaatacccgtgccattctggatatgacgtcccagtttgatttttatcacggtggcggtctggatgtttgttatttgagttttgctgaagtcgaccagcacggtaacgtcggcgtgcataaattcaatggtaaaatcatgggcaccggtggatttattgatatcagtgccactagcaagaaaatcattttctgcggcacattaactgcgggcagtttaaaaacagaaattaccgacggcaaattaaatatcgtccaggaaggacgggtgaagaaatttattcgggaactaccggaaattactttcagcggaaaaatcgctctcgagcgagggctggatgttcgttatatcactgagcgcgcagtattcacgctgaaagaagacggcctgcatttaatcgaaatcgcccctggcgtcgatttacaaaaagatattctcgacaaaatggatttcaccccagtgattagcccagaactcaaactgatggacgaaagattatttatcgatgcggcgatgggttttgtcctgcctgaagcggctcattaacaggagtataatgatggatttttctttaactgaagaacaagaactgctgctggccagtattcgcgaactgattacgactaactttccggaagagtatttccgcacctgcgatcaaaacgggacatatccgcgtgagtttatgcgggcgctggcggataacggtatttccatgcttggcgtgccggaagaatttggtggtatccctgcggattacgtcacccaaatgctggcgctgatggaagtgagtaaatgcggtgctccggcatttttaattaccaacggtcaatgtattcacagtatgcgccgtttcggttctgcagagcagctacgtaaaacggcagagagcaccctggaaacgggtgatcccgcctatgccctggcgttgacggaaccaggtgctggcagtgataacaacagtgccactaccacttacacgcgtaaaaacggcaaggtctacatcaacggacaaaaaacctttattaccggtgcgaaagagtacccgtatatgctggtgctggcgcgcgatccgcaaccgaaagatcccaaaaaagccttcaccctgtggtgggtcgactccagtaagcccggcattaagattaacccgctgcataaaatcggctggcatatgctcagcacctgcgaagtctatctcgacaacgtggaggttgaagagagcgacatggtgggcgaagaaggaatgggtttcctcaatgtgatgtacaactttgagatggagcgcctgatcaacgccgcgcgcagcaccggctttgccgaatgcgcctttgaagatgccgcccgctatgccaaccaacgtatcgcttttggtaagcccattggtcataaccagatgatccaggaaaaactggcgctgatggcgattaagatcgacaacatgcgcaacatggtgctgaaagtggcatggcaagccgatcagcatcagagtctgcgcaccagcgcggcgctggcaaaactgtactgtgcacgtaccgcaatggaagtcattgatgatgcgattcaaatcatgggcggtctgggctataccgatgaggcgcgcgtctcccgcttctggcgtgatgtccgttgtgaacgtatcggcggcggtacagacgaaattatgatttacgtagcaggtcggcagatcctgaaagactatcagaacaaataatctgcaggcggcgcagcttcttaacaaactgcgccgccagatttatccaacaagacttaccggttgaggaaattcagataggatttcttgttccgcaaaacagtttttaaattgtctacggtaatcgctggggctacaaccgacatggcgcaaaaacagtttggcaaagtgatcgacattttcataacccacacgccaggagatctctgcctgacttaattcagtattagtgagactccattttgcttccgtcatacgccgttgaataacatagttaataggggaaatacgatactctttggtaaattcatggcaaatataactgacgctggcacgaaattttttgcttaactgttctaaagtgattttttcgcgataattattattcagatagaaaagaatatcttttatcagaacatcttttttaatatacccctgctcgctacgataagcatttttaaaattttcgtagtaaagaatggctaacgtataggcaaatgcatcccataagctagatgtttggctatttttactttgcggcaaaatcacacttagctcattaaataaggtttttatgacttcttttccctgccccgcggcaattaccggacaagaatgcggttgcagtagctgattttcctcagccccctgaaactgaaagccgtacagcgcacaggtacacgtcgttgccggatcgttaacgtcagaggccaccgcatgcagcctgccgcgttctatcaccacaatgtcatccgcatgtgcgacatataagctagaatcgatggtaaaccttgcaacccctttcttgacgtaaatcaactcggtttcattgtcatgaacgtgatgtccggactcccattttggatcatcgctaaatgcaaaacgactaagccgtggcgttttaccggcgacaaacagcgtttcactggcgttatcaaaacagcgttgatacatgacaacctccctattccatgagcaagcaaaaacaatatatgccggataaaatacggcgtgtattgcggttatacaaccgcgtttagcgagagctaaacaagattatttacactgaatgcaagattgtacggtcatggaataactatattgccgcaaattgcacttttgttttagcgatcgcattttttttgcaagattgttggcaaggaaaacagcttgctccgtcgaaaaccccgcaccgctatcgcacactattttcaggccatttttaccttccatcggagatggttccgtatgcgactcacaggagaaatcatgaaaataataacctgctttaagctggtgcctgaagaacaggacattgttgtcactccagaatacaccctgaatttcgacaatgccgacgccaaaatcagccagttcgatctcaatgccattgaagctgcaagccagctcgcaacagatgacgatgagatagccgcgctgaccgttggcggcagtttgttgcagaacagcaaagtgcgcaaagacgtgctatcccgcgggccgcacagcctgtatttggtgcaggatgcgcaacttgaacatgcactgcctctcgataccgcaaaagcgctggcggcagcaattgaaaagatcggcttcgatttactgatctttggtgaaggttccggcgacctttatgcccagcaggttggcttgctggtcggagaaattctgcaacttccggtgattaatgcagtgagtgctattcagcgtcagggcaatacactggtgattgaacgcacgcttgaagatgatgttgaagttattgaactctctgttccagccgtgctctgcgtcacctccgatattaacgtgccacgcattcctagcatgaaagccattctcggcgcgggtaaaaaaccggtaaatcagtggcaggcaagtgatattgactggagccagagcgcgccacttgctgaactggtcggcattcgcgtaccgccgcaaacagaacgtaagcacatcattatcgataacgatagcccggaggccattgccgagctggcggaacatctgaagaaagccctgaactgaagcctacggagaagaaacgatgagtcaattaaacagcgtctgggtctttagcgataatcctgaacgttatgctgaactgtttggcggcgctcagcaatggggccaacaggtgtatgccattgtacaaaataccgaccaggcgcaggcagttatgccttatggtccaaaatgtctttatgttcttgcgcaaaacgacgcgctgcaacgcactgaaaattacgccgaaagcattgctgccctgctgaaagataaacaccccgctatgttgctgttggccgcgacgaaacgtggtaaagcgctggcagcacggttaagtgtgcaactgaatgcggcgctggtgaacgatgccacggcggtggatattgtcgatggtcacatttgcgccgaacaccggatgtatggcgggttagcgttcgctcaggaaaagatcaacagcccgctggcgatcattacccttgcacccggtgttcaggaaccgtgcaccagtgatacctctcatcagtgcccgacagaaacggtaccttatgttgctccgcgtcatgaaattctctgtcgcgaacgccgtgcgaaagccgcaagcagcgtggacctgagcaaagcaaaacgtgtggttggcgtcggtcgtggactggcggcgcaggatgacctaaaaatggtccacgaactggcggcggtgctgaatgctgaagtcggctgtagtcgtccaattgccgaaggcgagaactggatggagcgtgaacgttatatcggtgtctccggcgtgttgctgaaatccgatctctacctgacgctggggatctccgggcagatccagcatatggttggcggcaacggcgcaaaagtgattgtcgccatcaataaagataaaaatgcgccaatcttcaactatgccgactacggtctggtgggcgatatctacaaagtcgtccctgccctgattagccagttgagccgctaattcccctttcaaccacatctcccgctgtaaacgcagcgggaagggagcataacgcatgagcgatgacaaatttgatgccattgtggtcggtgcgggcgttgctggtagcgttgccgcactggtcatggcacgagccgggctggatgtcctggtgatagaacgcggcgacagtgccggatgtaaaaacatgaccggcgggcgtctttatgcccacacacttgaagcaatcattccaggctttgcagtaagtgcgccggtagaacgcaaggtcacacgcgagaaaatctccttcttaaccgaagaaagcgccgttaccctcgattttcaccgcgagcagccagatgttccgcaacacgcatcttataccgtattgcgtaatcgtctggacccgtggttgatggaacaagccgagcaggcgggcgcgcagtttatcccaggcgttcgcgtcgacgcgctggttcgtgaaggaaacaaggtcactggcgtgcaggctggggatgatattctcgaagcgaatgtggtgattctggctgatggcgttaacagcatgcttggccgcagcctgggaatggttcccgcttccgatccgcatcattacgctgttggtgttaaagaggttattggcctcacaccagaacagatcaacgatcgctttaatattacgggcgaggaaggtgccgcctggctgtttgccggttccccttctgacggcctgatgggcgggggatttctctataccaacaaggattccatatccttggggctggtttgtggattgggtgatatcgcccatgcgcaaaaaagcgtgccgcaaatgctggaagattttaaacaacaccccgccattcgcccgctgattagcggcggcaaactgcttgaatattccgcgcatatggtgccggaaggcggtctggcaatggtgccgcaactggttaacgagggcgtgatgatcgttggtgacgccgcaggcttctgcctgaatttgggttttacggtccgcggcatggatttagccattgcaagcgctcaggctgccgccacaacggtgatcgccgccaaagaacgcgcggatttctccgccagcagtctggcgcaatacaaacgtgagctggaacaaagctgcgtcatgcgtgatatgcagcattttcgcaagatcccggcgctgatggaaaacccgcgcctgtttagccaatacccacgaatggtagccgacatcatgaacgagatgttcaccatcgacggcaaaccaaaccagccggtacgaaaaatgatcatgggacatgcgaagaaaattgggctgatcaacttgctgaaagatggcattaagggagcaaccgcgctatgagccagaacgctacggttaacgtcgacatcaaattaggcgtcaataaattccatgttgatgagggccacccgcatatcattctggcggaaaatcccgatatcaatgaattccataaattaatgaaagcctgccctgccggactttataagcaggatgacgcaggaaacattcattttgattccgccggttgtctggagtgcggcacctgtcgggtgctgtgcggtaacactattctcgaacagtggcaatatcccgcaggcaccttcggtattgattttcgctacggctaatcatgcatcccacaggcccgcatctcgggcctgatgttctgtttcgagagtccaacatgaaagtgacattaacgtttaacgaacaacgtcgtgcggcgtatcgtcagcaagggttatggggcgatgctagcctggccgattactggcagcagaccgctcgtgcgatgccagacaaaattgccgtggtcgataatcatggtgcaagctacacctatagcgcgctcgatcacgccgcgagctgtctggcaaactggatgttagcgaagggtattgaaagtggcgatcgcatcgcatttcaactgcctggctggtgtgaatttaccgttatctatcttgcctgcctgaaaatcggtgcagtttccgtgccgctgttgccttcctggcgggaagcagaactggtgtgggtgctcaataagtgtcaggcaaaaatgttctttgcaccgacgttgtttaaacaaacgcgtccggtagatttaatcctgccgctgcaaaatcagcttccacaactacaacaaattgtcggcgtggacaaactggctcccgccacctcttccctcagtttaagtcagattatcgccgacaataccagtctgaccacggcgataacgacccacggcgatgaattagctgcggtgctgtttacctccggaaccgagggtctgccaaagggcgtgatgctaacgcataacaatattctcgccagtgagcgggcttattgcgcgcgactgaatctgacctggcaggatgtctttatgatgcctgcgccacttggtcacgcaacgggctttctgcatggcgtaacggcaccattcttaattggcgctcgcagcgtgttgttagatattttcactcctgatgcgtgtctcgcgctgcttgagcagcagcgttgcacctgtatgctcggcgcaacgccgtttgtctatgatcttttgaatgtactagagaaacaacccgcggaccttagtgcgctgcgtttctttctttgcggcggaaccacaatccccaaaaaagtggcgcgtgaatgccagcagcgcggcattaaattattaagtgtttatggttccacagaaagtagcccgcatgcggtggtgaatctcgatgatcctttgagccgctttatgcacaccgatggttacgctgccgcaggtgtagagattaaagtggtcgatgacgcacgcaagaccttaccgccaggttgcgaaggtgaagaagccagccgtggccccaatgtgtttatggggtattttgatgaacctgaattaaccgcccgtgccctggatgaagaaggctggtattacagcggcgatctctgccgtatggatgaggctggctatataaaaattaccggacgcaaaaaagatattattgtccgcggcggcgaaaatattagcagccgtgaagtggaagatattttattgcagcatcctaaaattcacgatgcctgtgtggttgcaatgtccgatgaacgtttaggtgaacgaagttgcgcttatgtcgtgctgaaagcgccgcatcatagtttaagcctggaagaggtagtggctttttttagccgtaaacgggtcgcaaaatataaatatcctgaacatatcgtggtaatcgaaaaactaccgcgaactaccagtggtaaaatacaaaagtttttgttaagaaaagatattatgcggcgtttaacgcaggatgtctgtgaagagattgaataagtttcatcttcggggatcacataaccccggcgactaaacgccgccggggatttattttatttcttcagttcagccaggcttaaccaggtttgcaccacggtgtccgggttcagagacaggctatcgatcccctcttccatcaaccatgcggcaaagtcttcgtggtcggacggaccctgaccgcaaatcccgacatatttgccctgtttcttcgcggcacggatagccatgctcagcagtgctttcaccgcatcgttgcgctcatcgaacaattcagacaccacgccggagtcacggtccagaccgagcgccagctgcgtcatatcgttactgccaatactgaagccgtcgaaatattcgaggaactgctcggccagcaaggcgttggacgggatttcacacatcatgatgattttcagcccgttctcgccacgtttcagcccctgacgcgccagttcttcaaccaccgctttcgcctgatctacggtacgcacgaacgggatcatgatctcaacgttggtcagtcccatgtcgttgcgcacacgtttcactgcttcacactccagcgcgaaacagtcgcggaagctgtcggaaacatagcggcccgcgccacggaagccgagcatcgggttctcttcatctggctcgtaacgctcaccaccgaccaggttggcatattcgttgcttttaaaatcagagagacggacaatgacgcgcttcggataaaacgcggcacccagcgtcgcgatcccttcagtcagacgaccaacgtaaaattcacgcggagaatcaaaacctttcatcatctcgcggatttcgttttgcaactgcggttcctgatcgtcaaactcaagcagtgcgcgtgggtggacgccaatcatacggttgatgataaattccagacgcgcaaggcccacgccttcgttcggtaggcaggcgaagtcgaaagcacggtccgggttaccgacgttcatcatcactttcaacggcagatccggcatcgtttctacgctggagcttttcacgctaaattccagcaactccgcatagacgtaaccggtatcaccttcggcacaagaaacagtgacgttctcaccgtctttcatccgttctgttgcatctccacagcccactaccgccggaatgcccagttcacgagcgatgatcgccgcgtgacaggtacgaccgccacggttggtgacgatggcagatgctttcttcatgatcggttcccagtccgggtcggtcatgtcagtaaccagcacgtcgccaggttcgatgcggttcatttcgctgatgtcatggatgactttcaccggacccgcaccgatgcgatgaccgatagcacggccttcggcgataatcttaccctgactatgcagcgtataacgctccatgacctgaccgcgactgcgcacggtttccggacgcgcctgcacaatgaacagtttaccggtgtggccatctttcgcccactcaatatccatcgggcgaccgtagtgtttctcaatttgtacggcctgttttgccagttcctgcacttcttcgttggtcaggctgaagatgtcacgctgttcctgcggtacgtcttcgattttaacctgcttgccgtgctcctgggtcggcgcgtaaaccatgcggatttttttgctccccatggtgcggcgcacgatagccgggcgattcgccgccagtgtcggtttatgcacgtaaaactcatccgggttaaccgcaccctgcacgaccatctcaccaaggccccatgcggaagtgataaacaccacctggtcaaagccggattcggtatcaatggagaacatcacgccagaacttgcgaggtcagagcgcaccatccgttgaacaccggcggagagcgccacaccacggtgatcgtaaccctggtgcacacgataagagatggcgcgatcgttaaacagagaagcaaatacatgtttcactgccacgagaacggcgtcaaaaccctgaacgttgaggaaggtttcctgctgaccggcaaaagaagcgtccggcatatcttctgcggtggcggaggagcgcaccgcaaaagaggcgttttcgtcatcggcggaaagctgtgcataggcttcgcggatggcgttttccagctcaggctggaagggagtgtcgataatccactggcggatttgcgcgcccgctttcgcaagctgagtaacatcgtcaatatccgttttatccagcagttcataaatgcgctggtttacgccgctttggtccagaaactggttaaacgcgtcggcggttgtggcgaaaccattcggaacggaaacacccattccggaaagattagtaatcatttcacccagggaggcatttttgcccccaaccctgtctacatcattcatgccgagttggttataccaaagcaccagcggactgctgccattgttggacatcgaacaatccttttgtgataaatgaacggtttgagaaacacatttctgcgcatttatctttgcatatttaaccggatgaaaaaaacggtgaatcgttcaagcaaatatatttttttactttttaagactgatcccagcgttgcgcaaatctgctctcttcgacaatttccacataaaccatcggtataaacgaaaccataaaaatgaaatgctgttttcataaaaaataaaattgaaggttcattttataaaccagacataacgttctacgcttctgtgcgtttttaatttatgctttcatagaattatgtctgcatcacgggaagaacaaaatggataatgctgttgatcgccacgttttttatatttctgatggtacggcaataactgcggaggtattaggacacgcagtaatgagtcaatttcccgtcactatcagcagcatcacgctgccgtttgtcgaaaatgagagccgtgcacgggcagtgaaggatcagattgacgcaatttatcaccagacaggcgtgcgcccgctggtcttctactccatcgtgttgccggagattcgcgccatcatcttgcaaagtgaaggcttttgccaggatatcgttcaggcgctggttgccccgctacaacaagagatgaaactggatccaacgccgattgctcatcgtacccatggccttaaccctaataatctcaataaatatgatgcgcgcattgcggcgattgattacaccctcgcccacgatgacggcattagcttgcgcaatctggaccaggctcaggtgatcctgctcggtgtttctcgctgtggtaaaacccccaccagtctgtatctggcaatgcagtttggtatccgcgcggcaaactacccctttattgccgacgatatggataatctggtgctacccgcgagcctcaaaccgcttcagcataaattgttcggcctgactatcgacccggaacgtctggcggcgattcgcgaggaacgtcgggagaacagtcgctatgccagccttcgtcagtgcaggatggaagtcgcggaagtggaagccttgtaccgtaaaaatcagatcccgtggattaacagtaccaattatagcgtagaagagattgccaccaagatcctcgatatcatgggccttagtcgccgaatgtactaaagaactagtgcattagcttatttttttgttatcatgctaaccacccggcgaggtgtgacacacctcgcacttgaaatcagcagcgattggtttatcgtgatgcgcatcacttcccggcagtcctgccgtagaagcaacaaatttctgagacttgtaatgaacagaactgacgaactccgtactgcgcgtattgagagcctggtaacgcccgccgaactcgcgctacggtatcccgtaacgcctggcgtcgccacccatgtcaccgactcccgccgcagaattgaaaaaatactgaatggtgaagataagcgactgttggtcattattggcccctgcagcatccacgatctcaccgctgcaatggagtacgccacccgtctgcagagcctgcgcaaccagtaccagagtcggctggaaatcgtaatgcgcacctattttgaaaaaccacgaactgttgtcggctggaaaggactaatctccgatccagatttaaacggcagctatcgggtaaatcacggtctggagctggcgcgcaaattacttttacaggtaaatgagctgggcgtcccaaccgcgaccgagttcctcgatatggtgaccggtcagtttattgctgatttaatcagttggggcgcgattggcgcacgtactaccgaaagtcagatccaccgcgaaatggctagcgcactctcctgtccggtaggttttaaaaatggtaccgatggcaatacgcggattgctgtggatgctatccgcgcagcccgcgccagccatatgttcctcagcccagacaaaaatggtcagatgaccatctatcagaccagcggcaacccgtatggccacattattatgcgtggcggcaaaaaaccgaattatcatgccgatgatatcgccgcagcctgcgatacgctgcacgagtttgatttacctgaacatctggtggtggatttcagccacggtaactgccagaagcagcaccgtcgccagttagaagtttgtgaggatatttgtcagcaaatccgcaatggctctacggcgattgctggaattatggcggaaagtttcctgcgcgaaggaacgcaaaaaatcgtcggcagtcagccgctcacttacggtcaatccattaccgacccgtgtctgggctgggaggataccgaacgcctggtcgaaaaactcgcctctgcggtagatacccgcttctgaatgcgtgcccattcctgacggaatgggcatttctgcgcaacttgttgtcttctcaacaaattactgcttgctctggtcagccataatattgataataagaatcattgttatatcaattattattaatttttatgcgttatacggatagcagaaaactcacgcctgaaacggatgccaatcacaagaccgcttccccgcagcctattcggcgaatttccagccagacactgttaggtccggatggcaaactgattatcgatcatgacgggcaagaatatctgctccgtaaaactcaggctggcaagctgctgttgaccaagtaacctttaactgctgcagctgacttccagccgtttaccccagtcaggtggacgactgacatagtcatcatctctgtcgctgaaaggatttcgcaacgcctcatgcaggcggtgcaattccgtcatatcacccttttctgccgcttcaatcgcccgttgcgccaaccagttgcgcaataccagagcggggttaacgctttgcatcagttgctgacgctcactatcgctaacctcgtcttgttgcaaacgcccccgataacgggcaaaccagtcatcaaatgccgcacgatcaataaactcatcacgtagcggactcgccgcgctgtgctgctcggtcagactcagcatgcggaatgtgcgggtataatcgctgcgctctcgcgccatcagactgaataattcattcagtagcgcgttatcctctttttgctccgtcatgaagcccagtttctgccgcatccgttctccataatgcgtcaacaaaacctgctgatagctgtccagggcctcattcagggcatctacggcaacaaatgggctcaatgtctgcgccagacgctgtaaattccacaacgcgacggcaggttgattatcaaagctgtaacgcccttgatgatcgctgtgattacaaataaaaccgggttcgtaatcatcaagaaaaccaaacggcccgtaatcaagcgtcagccccagcaggctcatgttgtcggtattcatcaccccatgagcaaagccgaccgtctgccattgggcaattaagctcgcggtacgtgcgacaacatcgctaaaccagagacggtatttgtcctcatcatctgcaagatgactccagtaatgacgaatagcaaagtcagctaactgacgaaccttttcgctctcgcggcggtagtaaaaatgttcgaaatgaccaaagcgcagatgacttggtgccacacgcatcagcatcgcgcctggctccgccgtttcccgatacactgggctatcgctggtgacgatacttaacgcgcgggtcgtcggaatgcccagataatgcatcgcctcactggcgagactttctcgtatcgtgctacgtaaaaccgcccgtccatcacccattcggctataaggcgtcaggccagcacctttcagatgccagtccattgtagtgccatcagcaagcagttgttcgccgagtaaaatgccgcgcccatcacccagttggcccgcccagacgccgaactgatgaccactgtaaacctgcgccagtggactcataccaggcagtagggcttcgccgccccagacacctgcgccatttttaaacaggctgcttggaatactcagcgtgttagccagttcggtattatgccaaatcagccgggcattatttaaaggcgtaggggaaagtgctgtataggtttctggcaattcatcgcgccagcgggtaacaaaagacagggtcatagatcctcctgtttgatagtgtagacggttactctcgtcttaaacaccagcaaacagaagggttatcgctgaaccaacgtcgttatctgatttatgggaacggcaggccacaggcatccctggagagcatggaaatcgaagggggtaatctgtgccaatatttctgccgtatcaatgcctcccgcaatgatgcaattgcaacaaggggaaatttgcgcctggatcgcacgaataaacggttcgaaggagcggtgcgtgatttgttgctgaataaaacttttatccagcatgacgcgggtgaaaagaccatcaaaaaccgctttcattgtgctattgcctgctcccaaattacctaacacaaggggatacacttggcttaaggataaaagaccgcgattatcttttccttcattgagatgcgggtaattctcattaatcaacagttcaataaacggatattttaatagttcgcctgcgtaattatccctctctaataataatgtagccacttgtggcgttaaattaagccaggcaaagagtttatgttgaataaaaaaatgttggcaactttttagtaattccaactgctcactaaataattgccaatgttgctcctcggtaagttgcgctataacccgactcgtcgggatacgaaccgtaccatcttcactggagaaatgggtaattaactcaacgccgacaaggacttgctggttgtctcttatcggcaggaaatagcaatcagaatgataaagattctccaaaaaaatcttcatggtaaccgtccctctcgaaggatgtttttcagtatccggctaaaagggatgaggccataagacataacaattacagaaggagtaactttcatttgttccatgttaaccactttttcaggggtcctttttttagattatcctgattataaacgaataatccatttacggaatttttgtctgcaaaatactactgtattcaggagtaaatggacggcgatgtatcatcgccgtccatttttcgacatattagattcgtctcgcctgccagaaatttttctgccaatagacattatcaagactggaacgcatcactcccttgctggtagaggcgtggataaattggttgttggtatcgtaaatacctacatgcaaaccattttgtccggaccccgttttgaaaaagaccaggtcacctggcagcaactcgtctttatcaatttgcgtgccaatagaggcttgttgtttggtttcacggggcagctgcaaatcgaaacgatcgcgcatcgtcacaaccacaaatccgctacagtccacaccgcgccgcgtcatgccaccataacgatacggcgtgccatgccagctttgtagctggtcgttcaaaccggcaataacggtaatgctatcagaaagtctggcatttggcggcggtgctttatggtggctacacccggccagaagcagtgctgtgatcaaaataaggcagaaacgcattccgtacggttcctctgttttttattcttgcattaatttagcgtcgtaattacccgattttcaagatactaatgaaatcagatggtgctaatcagcattctgtgaccttcgatatccagacggcgaaaattcatcccataggcctgcgccagatttggcggcgtgagcacctcttccctgcgtccactggccagcatttttccaccttttagcaaccacgcccgatgcgcatgacgcaatgtgtggttgagatcgtgactgctcatcacaatcgccagtccttgctgacacagcgcgctcagaattttgtctaacgcactttgttgcgcaacatcaagactgttcatcggctcatcaagaagcagcaattggcctgcgggattggcttgtggtgtgatttgcaacaccaccgcagcaagacgtacgcgttgccattcaccgccggaaagttgattggtgctacgtccgagtttgtcatcaagagccagcgcccctgcgacatcattcagtagttcggtacgcgttttatcgtgctgatgcagtgtcaggtagtgccagaccggcgttgcaaacggcggcgtctgctgttgactaagataggcgcgatgcagcgcgagttttgttgcggaccatgcttccagtggttgccccgcgaactgaatgcttcccttaccgctggtcattccggccattcgcgccagtaaggtactcttacccgcgccattcggccccaccaggtgcaggatctccccagcccgaacctcgccagaaagcggccccaggcgggtagattccgcaacatcttgtaactgcatcacaatagacattattttgccaacgccagtttaatgctttccatcacaatgggatcttccggcgtcatatccggggaaaaacgctggatgacttttccgtccctgccaaccaggaatttttcaaaattccataaaatatcatccgggtacagcggtgcacggcctttgctgaccatacgggcatagaatccgctctcttccggcgcgactgcggtcggcgctgcggcaatcaatttttgatacagcggatggcgtccttcgccattaacttcaatcttactgaacatcgggaacgtcaccccccatgtggtggtacagtaagttttaatctcttcatcgctgcccggttcttgttccagaaactggttgcacgggaatcccagcaccataaaacctcgatcgacccaggctttctgaatattctccaactgctcatattgcggcgttaagccacacttactggcgacattgacaatcaacagcacattaccggcgaacttctccagcgtggtcacttcaccgtcgatatctttcactacggtcgtcagaatggaatcttgcatcgtttctcctgggtgtggtcagtaaaaatcttagcttttaatcatagaccgtctttttgcggttaacgtcctgcttttaacaataaccagataaacaccggcgcacctaacgttgcggtgaccacgccaataggcagctctgcggcagctaatgccaggcgcgctacaatatcggccagcagcaatgcgctcgcccctgccagcgcgcagccgggaagtaatacgcgatgatcggttaaaccacacaaccggagaatatgggggatcaccagaccaataaagccgatagcacccgccagcgccacactgacgccaaccatccagccggtcgctgccaccagcacattgcgccagaaccacaggggtaaacccagttgccgcgcgctgatctcgccaagtgctaacatattcatcggcctggactgacaacagatccacaacaacacggggatcaatgccagcatcagccagctttgccgccagtctacgccgccaaaaccgcccatcatccagtacatcagctgacgcaaatcaacactggtggaaaagtagatagcccacgtcattagtgcgctacagataatccctaatgcaacgccagccagcaataaccgactggtgctaagatgacgacgggcgaaacgtaagagtattaaagtgatgataagcgcgccagcaatcgcacacagccctagcgcccagttggggagttgcccttgcccaagcaataccgcggcgataagccccacgcctgcgccgttagagacgccaagtagtccaggttctgccagaggattttcaaacaacgcctgcattacagcgccggatatagccagcgccgcaccaaccagcaatacagccagcgtacgtggcaggcgaatttgccagacgaacagttcgccacgaggagtaaaccagtcacctgggctgatccattgttcaccggcgcaaaggcttaagagaagcgccagcagcatcaaaacactcaggcataataaccagcgaatattttgtcgctgttgttggcgggcaagtgtcagcatggtatccgttctgctgaagtgtcatggcgttgattttacggtgactcttcgacagtgaaaagaaaaaaggccgcagagcggcctttttagttagatcagattactcgtctttggggctagcgttttcgacccggctttttaacttctgcccgggtctgaaggtcaccacgcgccgtgctgtaatgggaatatcctcgcccgttttcgggttacgtcccgggcgttgattcttatcacgcagatcgaagttaccaaaaccagagagtttcacctgttcgccgttttccagagcgcgacggatctcttcgaaaaacagttcaaccagttctttggcatcccgcttgctaagcccaagcttatcaaacagatattcactcatttcagcttttgtaagcgccataggttcaatccctcaaacttgcctggaatcgctcttttaatgcctctacacatttggcgacggtagcggcaatctcctcttcttcgagtgtacggctggtatcttgcaggatcaggcttatggcgaggctcttatacccctccgcaacacccttaccgcggtacacgtcaaataagtttacgccaactacctgatttacgccaactttcttacattcggataaaatatccgctgcgggaacgttttctgcgaccaccaccgcgatgtcacgacggttcgccgggaagcgagaaatctcgcgcgcctgaggcaccacgcggtctgcgagcttgttccactccagttcgaacaccagagtgcgaccgttaagatccagtttacgttccagttcaggatgaacaaccccaacaaaaccaatacgttcacctttcagataaatcgctgcggattgccccggatgcagtgccggattcgcttctgcacggaactcaacctcattcagtttaccggtcaggtcgagaacggattcaagatcgcctttcaaatcatagaaatcaacggtctcttttgccaggttccagtgctcttcgtaacggttaccgcaaatcacaccggctaacatcagatcctgacgaatgcccaacggtgcctgagtatctggtacgaaacgcagaccgctttcgaaaatgcgcacacggttctgctgacggttctggttgtacaccacggttgccagcaggccagtccacagagaaagacgcattgcactcatttcaacagagatcgggcttggcagcagtaaggcttcaacgcctggatggatcatctgctgcactttcggatcaacgaagctgtaggtgatcacttcctgatagcctttgtcgttgagcagcgttttcacgcgcttgaggctcaggtcagcttcacggtgagtacccataatcaggcttgcctgtaccggctcatccgggatgttgttgtagccgtaaacacgcgcgacttcttcaaccagatcttcttcaatctccatatcgaaacgccagctcggcgcaactgcctgccattcgtctttgccttcggtcacttcgcagccgagacgacgcagaatgtcagttacctgctcatccgcaatatgatggccgatcaggcgatccagtttgctacgacgtagagtgatggttgcacgcttcggcagcgttgcttcgttggtgatatcaattaccgggccagcctcaccaccgcagatgtcgatcagcagacgggtcgcacgttccatcgctttgtgctgcagtgccggatcaacgccacgctcataacggtgagacgcatcggtatgcaggccatgacgacgagcacgaccggtgatagacagcgggctaaagaacgcgcattccagcagcacgttttgtgtttcgtcattcacgccagagtgttcgccaccgaagatgccgcccatcgccagcgccttgttgtggtcggcgatgaccagagtgtcagcattcagcttcgcttcagtaccgtcgagcagcaccagcgtttcgccctctttcgccatccgcaccacaatgccgccttcaatgcgatctttatcgaaagcgtgcatcggctggcccagttcgagcagcacatagttggtgacgtcaacaactgcatcgatagaacggatcccgcaacgacgcagtttttctttcatccacagcggagttggcgctttaacgttaatgccttttaccacacggccaagataacgcgggcaggcttccggcgcttcgactgtaatcggcagcgtgtcgtcgatggtcgcaccaaccggaacgatttccggttgaaccagcggcagctggttcagcacggcaacgtcacgcgcaacaccaatgatgcctaagcagtcggcacggtttggcgtcacgctgatttcgatggtgttgtcatcaagtttcaggtattcacggatatcggtgccaatcggcgcatccgcaggcagttcgataatgccgctgtgatcgtcagaaatgcccagttcagagaaggagcacagcatcccttcagacggttcgccacgcagtttcgccgctttaattttgaaatcacccggcagaacagcaccaatggtcgctaccgctacacgcaggccctgacggcagtttggcgcaccgcagacgatgtccagcaggcgatcgccgccgacattcacttttgtcacacgcagtttgtcagcgttcggatgctgcgcacactcaaccacttcaccaacgaccacgccgtggaagctgccggcaaccggttctacaccgtcaacttccaggcccgccatagtgatttgatttgccagcgcatcgctatcaatcgccgggttcacccattcgcgtaaccacagttcactgaatttcataatctattcctgccttatttaaactgtttgaggaaacgcagatcgttttcgaagaaactacgcaggtcggtgacgccgtaacgcaacatagtcagacgctccatccccatcccgaaggcgaaaccagagtaaacttccgggtcgatgccaacgttacgcaacacgttcggatgcaccatcccgcagcccagcacttccagccatttaccgtttttacccatgacgtccacttctgcagaaggttcggtaaacgggaagtaggaaggacggaagcgaatctgcaaatcttcctcaaagaagttacgcaggaagtcgtgcagcgtgcctttcaggttggtaaagctgatgttggtatcaacaatcagaccttccatctgatggaacatcggcgtgtgagtctggtcgtagtcgttacgataaacacggccaggcgcgatgatacgaatcggtggctgctgggctttcatggtgcggatctgtacgccagaggtctgggtacgcagcaggcgggtagtgtcaaaccagaaagtgtcgtggtcagcgcgcgccgggtggtgaccaggaatgttcagagcatcgaagttatgataatcgtcttcgatttccggcccggttgccacggtaaagccaagctcaccgaagaaactttcgatacggtcgatggtacgggtaaccggatgcagaccgccgttttcaatgcgacgacctggcagagagacatcaatcgtttccgccgccagacgcgcattcagtgcagcgctttccagttccgctttacgcgcattcagcgcctgctgaacctgctctttcgcttcgttgataaccgcaccagctgccggacgctcttctggcggcagctcacgcagggtcgtcatctgaagggttaagtgcccttttttacccaaatattcgacgcgcacattatctaacgcggcaacatcactcgcctggctaatggccgccttcgcactggcaaccagttctgcgagatgactcatggttttcctcattgtgtcagtggtgacactggttcgttggacttagagcctatcccatcaggctattttacttgccattttggtcccgggctgtgctcgaaattctcacgtacttaaatacgctccggtttctccgcgctggccgtgtccagtctggctgcgacaattacacctgatgagacaggctttttatttttcaaaacgcgcatacaaaaaaagcctccactgggaggctttcaggcgctgttttccgtttctcttctcacgcgctagcctcctggattcaggtgctaaagtaaaaaaagaagcggaaaatagcagcattcattgcttgcgttaccttttggtactcttcaaaagacctttattgaaaaggctacggcgataaaagtcaatgttttgatggcgttgaaacgaaaagagggagactagctccctctttcaactggcttatgccagagctgctttcgctttttcaaccagagcggtgaacgctactttgtcgaatactgcgatatcagccaggatcttacggtcgatttcaacagaggcttttttcaggccattgatgaatttgctgtaagaaataccgttctgacgtgctgctgcgttgatacgcgcaatccacagttgacggaactgacgcttacgttgacgacggtcacggtaagcatactgaccagctttgataacagcctggaaggcaacgcggtatacgcgagaacgcgcaccgtagtagcctttagcttgtttcaaaattttcttgtgacgtgcacgtgcaataacaccacgttttacgcgagccatatgtgctctcctgtatctatattctaattaaaaagttaaaaacgttaacggcttatgcgtacggcaggcacgcgattaccaggcccagatcgcctttggaaaccatggctttcggacgcaggtgacgtttacgtttggtcgcttttttggtcagaatgtgacgcaggttagcgtgcttgtgcttaaaaccacctttaccggtttttttgaagcgcttagcagcaccgcgtacggtcttaatttttggcattttaataacttccacttcgcattgttaataaacgaaacaaaggcgaacaaagcctgtgaagcccgaaggctccacagacagtgctacttgaaggccttactgtttcttcttaggagcgagcaccatgatcatctggcggccttcgatcttcgttgggaaggattcgaccactgccagttcttgcaaatcgtctttcacgcgattaagcacttccataccgatttgctggtgcgccatctcacgaccgcggaaacgcagcgtgattttggctttatcaccctcttcgagaaagcgaatcaggctgcggagttttacctgatagtcgccttcatctgtaccaggacggaatttaatttccttaacctggataactttttgctttttcttctgttccttagaagacttgctcttttcatagaggaatttgccgtaatccattatacgacaaaccggcggctcggcgttagggctgatctcgactaagtctactccggcttcttctgctttctccagagcttctctcagactcacaataccaagctgctcgccttccagacctgttaagcgaacttcctgggcgcgaatttcgccattgatacggttagggcgcgccgtttgaactcgttttccgcctttaataccttattcctccaattgtttaagactgcggctgcgaatctcttgttgcagcttctcgatcacttcatttacgtccatgcttcccaggtctttaccacggcgggtgcgaacggcaactttgccactttccacctctttatcaccacagaccagcatatatgggacgcgacgcaaagtgtgctcgcggattttaaagccaatcttctcatttctcaagtctgctttaacacgaatgcccgcattacttagtttttgcgtcaattcgttaacgtattcagactgactatcggtaatattcatgataacaacctgaaccggcgcaagccaggtcgggaagaaaccagcgaactcttcggtcaggataccgatgaaacgttccatgctccccagaattgcgcggtgaatcattaccggtactttacgttcattgtcttcgcctacataagaagcgctcagacgagacggcaaagagaagtccagctgtactgtaccgcactgccatgcacgatcgaggcagtcatacagggtaaattcaattttcggaccgtagaaagcgccttcacccagttgatattcaaacgggatgttgttttcttccagcgcaaccgccaggtccgcctcagcacgatcccacatttcgtcgctgccaatacgtttttcaggacgagtggagagtttgacgacgatcttctcgaagccaaaagtgctgtacatatcatagactaaacggatacatccgttaacttcatcgcgaatttgttcttcagtacagaagatatgcgcgtcatcctgggtaaatccacgcacgcgcatcaggccatgcaggctaccactcggctcgttacggtggcagctaccaaactcggccatacgcagcggcagatcgcgataagacttcagcccctggttgaaaatttgtacgtgacccgggcagttcatcggcttaatgcagtattcacggttctcagaagatgtggtgaacattgcatctttgtagttgtcccagtgaccggttttttcccacaggacacggtccatcatgaacggacctttaacttcctgatactggtactctttcagtttagaacgaacaaacacttccagttcacggaagatggtccagccgtcgttgtgccagaataccatacccggcgcttcttcctgcatatggtacaggtcgagctgtttaccgattttacggtggtcgcgtttcgcggcttcttccaggcgctgcaggtaagcgttaagtgcttttttgtctgcccacgccgtaccgtaaatacgttgcaacattttgttgttgctgtcgccacgccagtaagcccctgccgttttcattagtttgaaatgatggcagaaacgcatgttcggtacgtgcggaccgcggcacatatcgacatattcttcatggaagtacagacctggcttgtcatcatgggcgatgttttcgtcaagaatggagactttgtagctctccccacggttggcgaaagtttcacgcgcttcgtgccagctgactttcttcttaatgacgtcgtagtttttctcagcaagctcatgcatccgcttctcgagtgcttcgacatcttcctgggttaacgtgcggtcaagatcaacgtcgtaataaaaaccgttgtcaataaccgggccgattgccattttggtatgcggccaaagttgtttaatcgcgtgccctaacaggtgcgcacaggagtgacgaatgatctccagaccttcttcgtctttggcggtaatgatgctcagttgtgcgtcgttttcaatcagatcgcaagcatcaaccagttcgccattaacgcgccctgcgatacaggctttcgccagacctggaccaatgtccagcgcaacatccatggggcttacagcgtgatcgtaatggcgttggctgccatcaggaagagttataacaggcattttatatccttatttgcagtggtgacccacacgaaagatcacatacaaagaaaaatttgtttattaacagttcattgcgaaaccatctagccaacaaatgctaaattggttcgcaatcaggtacacaaatgaaagacattaacctctcaccttccacccggttgagcgatgttaacactaaaaaaagggagattgtacctttccgtttcacattgattcgattcgcaattcgtttgtagtgagtacaccagcaaaacgcttaaagaacaactgataacatcacggtgcgtctgaaaggtttactgcgagcggatttacagcagcataaactgaatccagcaaagttcgttgcgtgatttggcggtagtattttaaacgctcatgagattaatgacgaagtggtcatatcacaatgataaaagtgacacaattcttataacaatttttcgtgcacatttcgttctggcgataataattaatcatcatcctcaaaacctccagatatatataaggcgaacagattatgagtcaaaacgatatcattatcagaactcattataagtctcctcatagattgcacatcgatagcgacataccaacaccttcatcagagcctattaatcaatttgcgcgccagctcatcaccctacttgatacctctgacttaagttcgatgctgtcatactgtgttactcaggaatttaccgcaaactgtcgaaaaatatcacaaaattgttattccactgccctttttaccattaactttgccacttcacccatccatacagaaaatatactcattacattacactataaaaaagaaatcatttccttattactggaaaccacgcctattaaagctaaccatttgcgaagcatactggattatattgaacaggaacagttaactgctgaagatcgtaaccattgtatgaaactgtctaaaaaaatccatagagaaaaaaactatacacccaacagtaaatctcaatggtagtgcatgttttttgcaatctccttctgacgctattttttgtcgccatctgtcattgcaatacgcccttgattcattgagaaatggaaaaggcaaagtcaacctgattaaacattactcctccgttgaatccatacagcagcatgtccccttagtccgggacgcggagttcagagcattacttcgccatcctcctgcagggagtcgcgttatcgcgagtaaggattttggcttcgctttagatattttcttttgtcgaatgatggcaaacaatgtcagtcatatgtccgcgattttatatatagacaatcatactttgtcagtaaggctacgaataaagcagtcagtgtatggacaattaaattatgttgtgtccgtttacgacccgaacgataccaacgttgccgtcagagacacccacaggacagcacggggctttctttcgcttgataagttcatcagttcaggtcccgatgctcagacctgggctgatagatatgttcgcaactgtgcaattgctattctgcccctattacctgtgggagttccaggggctattttcgcgggtattgcatcacgaatgccatttgcccctatacatccatcggcaatgttgttaataatggctacaggccagtctcaacagcttattacattattcaaacagttgcccatactccctgaaaaagaaatcattgaaataataactgcgcagaatagcgttggtacacctgctttatttttggctatgatgaacggacatactgacaacgtgaaaatatttatgcaagaaattcagtcactggtagataatcacatcattcatgaagataatctggttaaattactgcaaactaaaagtgctaacgaaacacctggactttatatctccatgttgtatggattcgatgaaataatcgatatctttctgaatgcattaaccactccaatagcacaagagcttttaaacaaaaaactggtgatgagtattttagccatgaaaatacatgatggtgagccaggattatacgccgcaatggaaaataatcaccctttgtgtgtcacacggttcctctctaaaattaatggcatcgcctttaaatacaagttgagcaaagctaacatcatggatttattaaaaggagctacagcacagggaacccctgcattatacatcgccatgagcaagggtaatgaagacgtcgtgttatcttatatatcgacgctgggtgcttttgcaaaaaaacattcttttagtcaacatcagttatttacactattggccgctaaaaatcatgacaacatgtcagctgttcatatagccattcatcataagcattataaaactgtagaaacatattatgctgctattaatgcaatcagccaaagcctgagttttagtgctgatgaaataaagacgtatttataaccagctatttacgatatatatcgatacataattttatttttttcataaaacgcagaaacagtgaccatgtgcacaacgccacccgacggctgtaataacaaaaaatcccttgatgcctgtcccttttgttacactccgttatcacgcacaagagatatgcaggacactggtatgccgactaaacgctttgataaaaaacactggaagatggtggtggtgctactggcaatctgtggcgctatgttgttgctacgttgggcagcaatgatttggggctgagcagtgacaaacgaagacagccagaccgcataacacggtccggcagataattttacatgctgtagcccaggcttaaggttgtccgacggtcggtatgttccggtgcagactctggaggttcagagttccatgtgacgttgtaagccaccttcagtccaaaatgttcattaatagcaacatttaatgcgctttcggagttcagcgttgtgtcttccgcgccaaagacgctaacaccctgcgtaaatttagcgttgtcagtcaactgccatgcataagccccggaggcatagcccagcggctgggtttcactggcattgtcggtatatttgtcgtaacgcacacctggaccgaattcaaagcggaaactgtgtaccgggccattcaaaaactgacgaccataacccgcggtcaacacatcgcgctctcgatagccgttataacggtctgtcagccagcttgcctgaccaaataaatagtcataatcagttaaattaaaacggctacgcccgcccgccgcatatttttcactagaacgctcatcattagaagaagtattactggcgttcccccacaggctccaggcagtggtgtgtccataccaggtcatggtggtgtcagccgtaagactggagcttttcgtattgccactttgtgcaagatatcctgcgttcagattaccttcgaaaggttttttagcgctggcaggatcatccatgacagtaaaaacggaatcatcggcagctgcattcagactcgcaaacatgccccccgccaacataacgatggcaggaactgtcttcaaaagcttcatttatcaagagtccgtacaacaaaaaaagagaccatcgcggtcccggaaactttcttaaggatcaaagattagcgtccctggaaaggtaacgaattataaaaaggcgcgaataacttagcaatgtattcttatttcattttttgaataagcatgtggcgaaaacagatttttatttatatatatttatctgcaaaattttaaataaagctccaataaatcatattgttaatttcttcactttccgctgattcggtgccagactgaaatcagcctataggaggaaatgatggtacgtatctatacgttgacacttgcgccctctctcgatagcgcaacaattaccccgcaaatttatcccgaaggaaaactgcgctgtaccgcaccggtgttcgaacccgggggcggcggcatcaacgtcgcccgcgccattgcccatcttggaggcagtgccacagcgatcttcccggcgggtggcgcgaccggcgaacacctggttagtctgttggcggatgaaaatgtccccgtcgctactgtagaagccaaagactggacccggcagaatttacacgtacatgtggaagcaagcggtgagcagtatcgttttgttatgccaggcgcggcattaaatgaagatgagtttcgccagcttgaagagcaagttctggaaattgaatccggggccatcctggtcataagcggaagcctgccgccaggtgtgaagctggaaaaattaacccaactgatttccgctgcgcaaaaacaagggatccgctgcatcgtcgacagttctggcgaagcgttaagtgcagcactggcaattggtaacatcgagttggttaagcctaaccaaaaagaactcagtgcgctggtgaatcgcgaactcacccagccggacgatgtccgcaaagccgcgcaggaaatcgttaatagcggcaaggccaaacgggttgtcgtttccctgggtccacaaggagcgctgggtgttgatagtgaaaactgtattcaggtggtgccaccaccggtgaaaagccagagtaccgttggcgctggtgacagcatggtcggcgcgatgacactgaaactggcagaaaatgcctctcttgaagagatggttcgttttggcgtagctgcggggagtgcagccacactcaatcagggaacacgtctgtgctcccatgacgatacgcaaaaaatttacgcttacctttcccgctaacaaaaacattcccccagcattgggggaatcatcaccaacctgtcggcaacgcgtttctccgactatgctcaaaagtcatgtgataacaaaggggtgaactatggccagtggcgatcttgtccgttatgtcataaccgtcatgttgcatgaggatacattgactgaaattaacgagttgaataattacctgactcgcgacggttttttgctcactatgacggatgatgagggaaatatccatgagctgggaactaacacttttggacttatcagtacccaaagtgaagaagaaattagagaactggttagcgggcttacccaaagtgcaaccggcaaagatcctgaaatcaccatcacgacctgggaggaatggaatagcaacagaaaataaatggtttttgggcaataatcagtctgtggtgtgcgttagctcgtgtttttacaccgcattcttgcgctaaccttatgatctggcagacaacatgggagagacatcatgtggcaggcaatcagtcgtcttttgagcgagcagttaggtgaaggcgaaatcgaactgcgtaatgaactgcctggcggagaagtccatgccgcatggcatttgcgctatgcaggacatgattttttcgtcaaatgtgatgaaagggaactgcttcccggttttaccgccgaagccgaccaactggagttactgagccgtagtaaaaccgtcaccgtgcctaaggtttgggcagttggcgctgaccgtgactacagttttctggtgatggattatctcccacctcgtccgctggatgcgcatagcgcatttattcttggtcagcaaattgcgcgtttacatcaatggagcgaccaaccacaatttggccttgatttcgataacgcgctctccacaactccacagcccaacacctggcaacgtcgctggagtacgttttttgctgaacaacggattggctggcagttggaactggctgcagaaaaagggatcgctttcggcaatatcgacgccatcgtcgagcatattcagcagcgtctggccagtcatcaaccgcagccttctctgttgcacggcgatttatggtccggcaactgtgcactgggtccggatggcccgtacattttcgacccggcctgctactggggtgaccgagagtgcgacctggcgatgttaccgctgcatactgaacagccgccacaaatctatgacggctatcagagtgtatccccgctacctgccgatttccttgaacgtcaaccggtttaccaactctacacgctgttaaatcgtgcaaggttatttggcggtcagcatttggttattgctcagcagagtttggatagattattagcagcatgatatgggttgaggataatggccgctccgtgcggccttttgattaaataaacccaagcagagaaaagaacacataacctgcagcaatacaaataaccggcaggatatacagactgaaaaactgcaggaaaatagtatggtgcggaacaacaatacgggactcaatttgttcacgcgttagcccctcttcccctttggctttttccagaatgagttgatcttcaacaccttcccgcaagaagcgcgcctggcgactcatccgggcaccggaatcctgcaacgccagtccgacaaaaatcaggatgaaaatcacccagaacataacgttcacgccaccattaaaattgggcgtcggggagttataccagaatagattcaaaaaaggcgtattcgcctgcatcatatcgatcatgacatgagtaaagtcgagcatgaccgcattaatgccttccttgttttcctgccgggtattcataaatttcagcaaagaaatcaatgtagagatcaatgcaggtataaaaatcacccaacccaaaatccttttcaaaacagcaatgcgtccagcttgttgatacgtcatgagttctccttgattaagacgcgtcgtttcacttagtttacctgtagatatctgttttcgcccattctttaaaggcgatatgataggcgcttaatcataagcacggcttaataccttacacataatgctctaaaggagaggttgtaatgagtaccccgcgtcagattcttgctgcaatttttgatatggatggattacttatcgacagtgaacctttatgggatcgagccgaactggatgtgatggcaagcctgggggtggatatctcccgtcgtaacgagctgccggacaccttaggtttacgcatcgatatggtggtcgatctttggtacgcccggcaaccgtggaatgggccaagccgtcaggaagtagtagaacgggttattgcccgtgccattagtctggttgaagagacacgtccattattaccaggcgtgcgcgaagccgttgcgttatgcaaagaacaaggtttattggtgggactggcctccgcgagtccactacatatgctggaaaaagtgttgaccatgtttgacttacgcgacagtttcgatgccctcgccagcgccgaaaaactgccttacagcaagccgcatccgcaagtatatctcgactgcgcagcaaaactgggcgttgaccctctgacctgcgtagcgctggaagatagcgtaaatggcatgatcgcctctaaagcagcccgcatgcgttccatcgtcgttcctgcgccagaagcgcaaaatgatccacgttttgtattagcagacgtcaaacttagtagcctgacagaactcaccgcaaaagaccttctcggttaatgaccaggggcagtgatctcgctgcccctggttctttatctgaaattgcattcaactgacggattaatcgtcaatttaagagaaagagttacaccgtcaccacttccgtgcactgtataaaaatcctatactgtacgtatcgacagtttagtgagttttatcatgacggcggaaggtcaccttctcttttctattgcttgtgcggtatttgccaaaaatgccgagctgacgcccgtgctggcacagggtgactggtggcatattgtcccttccgcaatcctgacgtgtttgttaccggacatcgatcacccaaagagctttcttgggcagcgattaaaatggataagtaaaccgatcgcccgcgcttttgggcatcgtggttttacccacagtctgctggcggtatttgcgctgctggcaaccttttaccttaaggttccggaaggctggttcattccggctgatgcgctacaaggaatggtgctgggttatttgagccacatacttgccgatatgctgacacccgccggtgttcccctgctctggccatgccgctggcgtttccgcttgcctatcctggttccccaaaagggcaaccaactggaacgttttatctgcatggcattatttgtctggagcgtatggatgccccatagtttacccgagaacagcgctgttcgttggagtagccaaatgatcaataccttgcagatccagtttcatcggcttattaagcatcaggttgaatactaaaaaggcaaaaatcacctttctggaataagcaattccatttgaatataagagccagctcacagttctgttaatcttgcgccaacactatgactgctacgcagtgatagaaataataagatcaggagaacggggatgaactttccattaattgcgaacatcgtggtgttcgttgtactgctgtttgcgctggctcagacccgccataaacagtggagtctggcgaaaaaagtgctggtgggtctggtgatgggtgtggtttttggccttgccctgcataccatttatggttctgacagccaggtacttaaagattctgtacagtggtttaacatcgttggtaacggctatgttcaactgctgcaaatgatcgttatgccgttagtcttcgcctctattctgagcgcggttgcccgtctgcataacgcatctcagttaggcaaaatcagttttctgaccatcggtacgcttttgtttaccacgctgattgcggcgctggtcggtgtgctggtcaccaacctgtttggtttgacggctgaaggtctggttcagggtggtgcagaaactgcacgtctgaacgccattgaaagtaactatgttggtaaagtctctgatctgagcgttccgcagctggtcttgtcctttatcccgaaaaacccgtttgccgatcttaccggagccaatccgacgagtattatcagcgtggtaatttttgccgcattcctcggcgtagctgcattgaaactgctgaaggatgatgcgccgaaaggtgaacgcgtcttagccgctatcgataccctacaaagctgggtgatgaaactggttcgcctggtcatgcagttgaccccttacggcgttctggctctaatgaccaaagtggttgcaggttctaacttgcaagacatcatcaaactgggaagtttcgttgtcgcgtcctacctcggtctgctgattatgtttgcagtgcatggcattctgctgggcattaatggcgtgagtccgctgaagtacttccgtaaggtatggcctgtgctgacgtttgcctttaccagccgttccagtgctgcgtctatcccactgaatgtggaagcacaaacgcgtcgtctgggcgttcctgaatccatcgccagtttcgccgcctctttcggtgcaaccattggtcagaacggctgcgccggtttgtatccggcaatgctggcggtgatggttgcgcctacggttggcattaacccgctggacccgatgtggattgcgacgctggtcggtattgttaccgttagttccgcaggcgttgccggtgtcggtggtggtgcaactttcgccgcactgattgtactgcctgcgatgggcctgccagtaaccctggtggcgctgttaatctccgttgaaccgcttatcgacatgggccgtacggcgttaaacgttagtggcagcatgacagctggcacgctgaccagccagtggctgaagcaaaccgataaagccattctggatagcgaagacgacgccgaactggcacaccattaattcttatgctggcaacggtccgttttgtataggggccgttgccttactttttaaatgttccatcgcggcgatgcatacactctcatatttaaacagatcgtcagcgaaaaaaatgtccaacttatcaatacattcctggctcaaactatgtgcctgtaggctgaagcttaaaacctcatacccgagacgttttctaagactactatctggaatactcataatatcttcaagcacaccacttcccattcccggaagatttagtggattaaaaagaagattgatattaagcatacttattatgctaggaaactttaggagactctcatttttttgaatcgcagcaaaaatgctcccgacaggatgtatataattttgttcatagtatatagtccttaaatagtgaataaccaacctgttttttatactgatcaaattggtcattttttctgggcgaaatacagaagtgacatccattccaataaaatctttatttatacctcttatccgaatttcactaccataaagattattaattattactctatatttaacattgtcctgcagatatgtatcaaaactaagtgctggcgctcctggcttactggcatcatagttaatgttagacatataggcaatcatataattaaagttactttctgctatttcatcgcagtcacattgacccgtacttataaagaaagtgagtgctgtcatagtagactgcagcctttctttaaaagagtcgaaagccaggcttttaatatttaaatcaccataattactctgtattaagtttgtagaaaacatctcccgcctcatattgttaacaaaattattatctcatttaaatctaagtcatttacaatataagtttaagagcgacgccacaggatgaactatcaaaaatagctcatcatgattagcaaaacttaaccattttaaaataaataaacaattaaagaaaaaagatcacttatttatagcaatagatcgtcaaaggcagctttttgttacaggtggtttgaatgaatgtagcaacgaaatacagaatttcaggtcatgtaactcccggcaaaaccgggaggtatgtaatccttactcagtcacttccccttcctggcggatctgatttgcccaacgttgggcagattcaggcacagtaaacgccggactgcgcagaaaactctctcccatcagtacaaacgcaacatatttgccacgcagcatccagacatcacgaaagctatccatctttatcgcatgttctggcggcgcgggttccgtgcgtgggacatagctaataatctggcggttttgctggcggagcggtttcttcattactggcttcactaaacgcatattaaaaatcagaaaaactgtagtttagccgatttagcccctgtacgtcccgctttgcgtgtatttcataacaccgtttccagaatagtctccgaagcgggatctggctggtggtctatagttagagagttttttgaccaaaacagcggccctttcagtaataaattaaggagacgagttcaatgagccaacataacgaaaagaacccacatcagcaccagagtccactacacgattccagcgaagcgaaaccggggatggacagtctggcacctgaggacggctctcatcgtccagcggctgaaccaacaccgccaggtgcacaacctaccgccccagggagcctgaaagcccctgatacgcgtaacgaaaaacttaattctctggaagacgtacgcaaaggcagtgaaaattatgcgctgaccactaatcagggcgtgcgcatcgccgacgatcaaaacagtctgcgtgccggtagccgtggtccaacgctgctggaagattttattctgcgcgagaaaatcacccactttgaccatgagcgcattccggaacgtattgttcatgcacgcggaagtgccgctcacggttatttccagccatataaaagcttaagcgatattaccaaagcggatttcctcagtgatccgaacaaaatcaccccagtatttgtacgtttctctaccgttcagggtggtgctggctctgctgataccgtgcgtgatatccgtggctttgccaccaagttctataccgaagagggtatttttgacctcgttggcaataacacgccaatcttctttatccaggatgcgcataaattccccgattttgttcatgcggtaaaaccagaaccgcactgggcaattccacaagggcaaagtgcccacgatactttctgggattatgtttctctgcaacctgaaactctgcacaacgtgatgtgggcgatgagcgatcgcggcatcccccgcagttaccgcaccatggaaggcttcggtattcacaccttccgcctgattaatgccgaagggaaggcaacgtttgtacgtttccactggaaaccactggcaggtaaagccagtctcgtttgggatgaagcacaaaaactcaccggacgtgacccggacttccaccgccgcgagttgtgggaagccattgaagcaggcgattttccggaatacgaactgggcttccagttgattcctgaagaagatgaattcaagttcgacttcgatcttctcgatccaaccaaacttatcccggaagaactggtgcccgttcagcgtgtcggcaaaatggtgctcaatcgcaacccggataacttctttgctgaaaacgaacaggcggctttccatcctgggcatatcgtgccgggactggacttcaccaacgatccgctgttgcagggacgtttgttctcctataccgatacacaaatcagtcgtcttggtgggccgaatttccatgagattccgattaaccgtccgacctgcccttaccataatttccagcgtgacggcatgcatcgcatggggatcgacactaacccggcgaattacgaaccgaacagcattaacgataactggccgcgcgaaacaccgccggggccgaaacgcggcggttttgaaagttaccaggagcgcgtggaaggcaataaagttcgcgagcgcagcccaagctttggcgaatattattcccatccgcgtctgttctggctaagtcagacgccatttgagcagcgccatattgtcgatggtttcagttttgagttaagcaaagtcgttcgtccgtatattcgtgagcgcgttgttgaccagctggcgcatattgatctcactctggcccaggcggtggcgaaaaatctcggtatcgaactgactgacgaccagctgaatatcaccccacctccggacgtcaacggtctgaaaaaggatccatccttaagtttgtacgccattcctgacggtgatgtgaaaggtcgcgtggtagcgattttacttaatgatgaagtgagaagcgcagaccttctggccattctcaaggcgctgaaggccaaaggcgttcatgccaaactgctctactcccgaatgggtgaagtgactgcggatgacggtacggtgttgcctatagccgctacctttgccggtgcacctagcctgacggtcgatgcggtcattgtcccttgcggcaatatcgcggatatcgctgacaacggcgatgccaactactacctgatggaagcctacaaacaccttaaaccgattgcgctggcgggtgacgcgcgcaagtttaaagcaacaatcaagatcgctgaccagggtgaagaagggattgtggaagctgacagcgctgacggtagttttatggatgaactgctaacgctgatggcagcacaccgcgtgtggagtcgcattcctaagattgacaaaattcctgcctgatgggaggcggcgcaattgcgccgcctcaaatgatttacatagtgcgctttgtttatgccggatgcggcgtgaacgccttatccggcctacaaaactgtgcaaattcaatatattgcaggaaacacgtaggcctgataagcgaagcgcatcaggcagttttgcgtttgtcagcagtctcaagcggcgcagttacgccgcctttgtaggaattaatcgccggatgcaaggttcacgccgcatctggcaaacatcctcacttacacatcccgataactccccaaccgataaccacgctgagcgatagcacctttcaagctcgcacttgtcaacacatccagctccgttaagcgtgggaaacagtaagcactctgacggatagtattatcgataaacgccggatgacacatcacctccaggctacgatcaccccgatggcctgcgtcatccagcacttgcaggaacaggctctcactgatctcttcaccgtagaatgcactgctgaatccctgggtagtgcgcaggttgaccggcaaatcaaacgccatctgacgatccgcccgcaacgcaatgccctgctctgccgcaaacctggcaacaatcgggaaaatctgcgggaacatatgcacatgatgatggctatcaagatgcgtaggtttgcgtccaaatagctcaatgaaacgcaaatactgactgacaagctcctgagtaatttcttccagcggtaaagcatcttcttctgccaactgccagatccattttcccagcacaccatcgcgggttaaccccggcatagctgtcagtggcttacccatagtaaggacaaagtgcatccctatggccagactcggttcatcacgactcaactgcaccgcatggtcaatagcctgcccattcaccagcgccgtcgtgctcgtgacaatcccattgcgacaggcctcgataatgccgtagttctgacctttgcttaagccaaaatcatcggcattaacaatcagtaagcgttccataatcagcctcggttaatgtgcttttttaagctctgcgatgcagtcggcaaagtttggcagccatttctcgtgcgccagaatcatctcgcgtgccagcagctcagcatcgcgatcggaatgcaccaacggactaaggtttagcgccagtaacacatcgttaaattctccgctaagtgcggcgttactggcagcaatctcgaagcctttaatggtgtgaatcagccccattactttatcatcgaaatgcgtaatgcgcggatgtggcgtcgcgccatcgcgccccagcttacaggtcatttctactgcccagtctgccggaatattatcaatctgcccatgatgcgggatattaacgtaatgttctgcttgcttgtcgttgtagatagcgttgatcacttcgcatgctgcatcagagtaataagccccaccgcgctgttccagttctttcggcttaactttcagctcaggatttttatacagctcaaaaagttgtttctcgactttctgtactacctgcgctcgtgcgccgcctttgtagtattcgcccatttcaatagccagcatctctttctgcttgaagtaatacagcagataagaacatggcagcagattcaagctacgaattaagccctcactaaatggcagatcgaaaatattttttacagaggacgcttttaactgcccactcgccacaccatcaagcaattcggcaaagcggctcttgccatttatcagcacatccttaatgaacaccatatggttgaggccgaacaaatcgatagataaatcatcgctgtctttcagcatcagaacatcgcgaataaacatcttcatgccgatcggaatattacacacgccgataaagcgtttaaatccggtatgacgataaacggcttcagtgaccattcccgccgggttagtgaagttaatcacccatgcattcggacaaagttcttcgacatcttttacgatgtcaaaaatcaccggaatggtacgcagacctttaaacaaaccgcccgcgccgttggtttcctgaccaagataaccatgacttaatggaatacgttcatccagttcacgcgccggtaattggccaacgcgcagttgggtagtaacgaaatcagcatctttcaatgcttcgcggcgatccagcgttttataaagcttcatcgggacgccagcgttatcaatcatccgttggcagagatcgaaaataatatccagtttcggtttaccaccttcgacatccaccagccataattcgctgaccggcaattcgtgataacgcttaataaatccttccagtaactccggggtatagctgctcccgccaccaatagtgacgacttttaatttctggctcataatttctcccttcagtacagaatactgatatctggcatatctgcccccccggacataaataatccagcaacaggacagatatgtgaattgtcaggtataacgacttactgattaaattcagtcaatttcttacgatagctcttaggcgtaaaggacgttaatttcttaaacgttttaataaacaaactcgggctactataaccggcctcaaacgcaatatccgtcacactatagttggtcatttccagttgttttttggcaaaattaatacggatttcattaataatctgcattggcgttttgccataatatcgttgagtcgctcgcgtcaaatattcctgacttttggcactcaacgccaccatattctccagcgcgctttcactaaactgctctttatcatgcatcttttctaccgtacttttcagccactgcggtacatcatcaatcacctgttcttcgcggtaatgacgtaaacggttaatgacataaaaagtaaccatctcaacaaactcttccagccctgtttcgcggaaattcaaactagaaatcactgtttccacataggtgagaaaagcgttattggtccggtatacctggctagcgacaaagcaataaggcaacaatggcaggtaatgctgctcaaaaaagcgtttactgatcccaacgttcaatatgcgcgtggcaccaaactcataaaaactttgatggtggctacctaacggaataaaaacaaaatcgccccgttccagtaacacgcgcttaccgttaatctcctggaaataacgcccggttaataccagagtaaattcataatagtcgtgctgatgcagtccgctgatactctcagttttgttatagataaacacatggaagtttttgccattaaacaactgctgttctcgggcagtggcaatttccggcgcgttaatcactggctgcatcatcgactccttatgccttcagtttttcatgaagctcaattaattcagtaatcagttcacgcgcaagcatggacgtcattaaatgatcctgagcgtggaccagcaccagactcactttcatcttaccttcgcccgcatcgccttcaatcagtttcgtctgtaccagatgcgcttcattcaatgccatccgactctgatccatcatggcttttgctgcggcaaaatcgccctgcttcgcctgtttcagtgccgcatacgccaggctgcgcgcttgtccggagttgatgatcagccccatcaccacttcttccagctcttcagcttccgtttgcgtatcgggaatgttatcgagatccatcatacatcgttcctctcttttcttaccggcacgattacccgtaccggcatcgattaaaatttcagggcgttagcgatatcttcttcgctctcttctttatcaatcgcattttgtgctttgttagccaccacaacaaagggcagataaattaacgttgcgatgccaaggttgaagagtgcgaccagcaatgcggcgacgctaccgttggtgttaaagaaggctcccagaccggttggcatggtccacggtgcaatattggtcaccggaggaataatgcccatgtagtacgctgcgagggtgattgccgccagaatcggttgtaccagtacaaacgggataaacatcaccgggttcatgataattggcagaccaaacagaatcggttcgttaatctggaagatgccggacggcagcgccagttttgccacctgacgataatcagcacggcgagaggcgataaagatagccaggatcaggcctaaagtcgcaccactgcccccaaggaaaataaaggagtccagcatcggcttggcccagatatggaaggtcttaccggctgccagcgccgcttcgacggaaccatattgctgataggtcgcgatattttccagtgcccacggcgtcataatgccgttgtccagtgcggtcagcgccagcgcgccatgaataccgaagaaccagagcagtggaacaaagatcacataggcccagcccaccacgctacccaagcttgccagtggggtactgatggtatccataatgatctgatggaagttggtgccccaggtattcaacgcccaggcaataatccccatcacggaaagaataataaagccgggaattaatgcgctgaaggaacggcttacactagcaggtacgctgtcgggcagtttaatgacccaattgcggcggacaataaaggtaaacatttctgccaccaccaggccaataataatcccggagatgatattcgccccacctaaccagtttgcaccaaccgcataggcctcaccgacactatatggggtgacggtcataaatgctgcaacggataacaacccagccgccagcgcatcgactttacgctcttctgccagcgccatgccaataaagaacggtgccattaaagacattattcctaatgttccgttatatacgttgccgccaatacctttcagaccattaagtgtttcaatggtactggcgtcgaggcgaatacctaaggaataaaaaaagctcccctccccaaagcttagaaaaacgttgttaattaatacaaacatggcccccgcaagggttaacggcattaagcgaataaagccatttttgattgcattaacgtgtggctgctttcctattttaactgcaaaagggaggagtaccttttcaaggcttgcaataacattactcatagaaaaatacccttaaaaaccgcaatttaaatattgcggtattgatttatgaaataactctttgacgggaaaatttaaaataaattaatttgctgcggcttttttaatcgctgcaaccgcagccttaagcacgcctaaaccatcgactttgccataaagcaggctgtcaattacttcaaccggtttgttgggtaacaaacgctggatttcgggcaacatataagcaatctgcggccctaataacacgacatcggcattctgacctttttcaccagccagtgtttccggaaatgcttcaataatgaccggaacttcatatttttctgcctgtgcgcgcattttacttaccagtaaagaggtagacatgcccgcagaacaaaacagataaatgtgtttcttttccataaaactgccctcatcgacgattatctgtcagccagacactccgcaagccttaacctgcttccatgctctgggtaacttgcgaaaccaacatgactttttttgtggctgaaaggagtatacggtatagacctgagcaatagtatttctttgaccttataaattgtttctccttgacctgtggttatgaccctcttcacatttcgggcaaataattcgcgaagataattaagaactcaggccaaaaaaaaccggcgcaatggccggtttccgttgttactcaagctttcagacgaattgattacttcgcagcctgtggatcagtgtcgtattcagcacaggtctgataaccggagttgatgacatgtccggtatcatctaacgcgacaaagtaggtttctgctttaccatcacgttgacccaggatgtaggtctggcaagtaccgcgagcatggatcatgctcacttcagagctaggtttacccgcaatttgtgcaacctgcgcccggctcatgccttttttgacgtctttcaccacaggctgtacaaactggtctttggtacgatcataagccgtacaacccgccagcatggttaataccgccgctgcactcagaattcctgccatattcttgttcatattccgtcctcttgtttatcagcgtgttagataagcctggaatacattgggcgctttttcaagcccgtgaacgaaacggctccgctttcagaggattcctgtatgacgttttaaccaccattcagcccgctgtcgcttgtcgtttcagtagcaacgggttagctttaaggaagttttgtcttttctgtctggaggggttcaatgacattgcaacaacaaataataaaggcgctgggcgcaaaaccgcagattaatgctgaagaggaaattcgtcgtagtgtcgattttctgaaaagctacctgcaaacttatccgttcattaaaagtctggtgctcgggatcagcggcggtcaggactccacgcttgccggaaagctgtgccagatggcgattaatgagctgcgcctggaaaccggcaacgaaagtctgcaatttattgccgtacgcctgccctatggtgttcaggccgacgaacaagattgccaggatgccattgcctttattcaaccggatcgcgtattaaccgttaatatcaagggcgcggtattggccagcgaacaggcattgcgggaagcaggcattgaactgagcgattttgtccgtggcaatgaaaaagcgcgtgagcggatgaaagcacaatatagcattgcgggtatgaccagcggtgtcgtggtgggcaccgatcatgcagcagaagccattaccggattcttcactaaatatggtgacggcggtacggacattaatccgctgtatcgtctcaacaaacgtcagggtaaacagttactggcggcattagcttgcccggaacacctttataagaaagcgccaacggccgatctggaagatgatcgcccttctctgccagatgaagtggcactcggcgtgacctatgacaatatcgacgactatctggaagggaaaaacgtacctcaacaggtcgccagaacaatagagaactggtatctgaaaaccgaacataaacgccgtccgccaattaccgttttcgatgatttctggaaaaagtaataatttgcacatattggattgtgcgaaaaagagtaatttgttcacgccggatgcggcgtgaacgccttattcgacctataaaactatgcaaattcaatacattgcaggagtcgaataggcctgacaggcgtagcacgtcagacggtgtaacctttgtcatcgacccgcctcttttttaatcgcttcccgcctgttacactggatagataaccagcattcggagtcaacagtggtacggcgtttaacttctccgcggctcgaatttgaagctgcggcaatttatgaatatcccgaacatttacgtagtttccttaatgacttacccacccgaccaggggtgtatctgtttcatggtgaaagtgacaccatgccgctctatatcggcaaaagcgttaacatccgcagccgcgtcctttctcatttacgtaccccggatgaagccgccatgctacggcaatcccgacggatcagctggatatgtaccgccggtgaaatcggcgctctgctccttgaagcgcgattaatcaaagaacaacagccgctgtttaataaacggttgcgccgcaatcgccagctctgtgccctgcaattaaatgaaaagcgcgtcgatgtggtgtatgccaaagaggtggattttagtcgagcccccaacctgtttggcctgtttgccaataggcgcgcagctttgcaagcattgcagaccatcgctgatgaacaaaaactttgttatggcctgctgggactggaaccgttaagtcgcggtcgtgcatgttttcgtagtgcgctaaaacgttgcgccggagcatgctgcggtaaagagagccatgaggaacatgcgctacgcttgcgccagtctctggagcgtttgcgggtggtgtgttggccttggcaaggggcggtggcgctgaaagaacagcacccggaaatgactcaatatcatattattcaaaactggctgtggctgggggcggttaatagcctggaagaagcgacaacgttaattcggacacccgccgggtttgatcacgacggttataaaattctttgtaagccgctgctttccggtaactatgaaattactgaacttgatccggcgaatgaccagcgagccagttgattactgaacttgatccgggctatgaccagcgagccagttgatttcactgaacaacagtttaccttgcggttgtaaaagccgcagggtgtgcctgccatcgaaccagcacgcgccctggtcggtagtgagcaatttatcgcccagttgccacgccccgttaatcacaaacaccaccccgccgcgactgccaaaggtagtaaacgtacgttcggcaattctgactttcgccttacagacatccaggcgtgtcatgatgttgaaatccatgctcatctgccctgccgtcagtttcgcttttaccacctggtccgctgcaaaggcaaaaggctggaacggttttaaggtatggttaaagcggtctgcgctttcaaggagcatctcgccgccttccagcaacgtcactatcctttccatgccgggaaacaaagaaaactccccattcgccgcgatggatgcaatgctggcacgccagtaaaaatcacgttttgccggtgggaacgtgcaaatttcgcgcgtttcaccggcagcatttcgccacagattcacgctcattttacgcatatcaaagtattccatactcgctcccggcccgttcttttcattgttatcgttcaggtaaccgtggatggttatcggcaactcgggtgatttacgttagtggtgatcaggctttttttacaactgtttgagaagagaaaagaaaaccgccgatcctgtccaccgcattactgcaaggtagtggacaagaccggcggtcttaagttttttggctgaaagattattcagcagttgcaggcattttaccttttgccgctggacgttctgtcagacgcttctcaaaattagcattaaattgctttttctgttccggcgtcaggatgttgtaaattttgttctgggtttccatgtgcgccagcatgttagctttgcgctgttcttccatttttgcgatctgcgcttcagcttttactttatcgaaggtatcgctggcaatgatgtcatgcattgcgcggcgttcttccagcggcggacgtttcatctggtcacgctggcctttcatgatttcgcggatctgctgtttctgcgcgtcggtcaggttcaggtctttgaacatcatgtcctgatgcggaccgaacttgcctttgtggtgcatcatcggcttcgcgtcagccggtgctgcggtagtggtgtctgcggcatgggccaggttagccgcgccaagagccagggtagaggcaacaaacagtgcagttaatttacgcatattctatatccttcctttcagttatttattacggctttcttaagtagcgtgccgtgttgacgagattaactttactgactttagcgtcaattaatcagagcaacggtaaaacaatgaaagtgtaaaaaacacttttgcgccaattatggagaaaaaaagaaaatttgatggagagtgatgagagaatattacaacacgatgattttgcagagattatgaagaactataccggatgactggtgataaataaagcaaataaccaggattaatctgtattaatttataagaaagcaacttaatacccgcagaatgatttctgcgggtaagtattagcttattttttcgagcattaatcccgcgcgtaatcccaacgctaccaacggattagggaataacacatactctacatcatgggttacggtaaaacgttcctctccgtcctgcgccagcaatgttcctttctcaaacggcataaaattcagcgtgtcacttgccatatgcatttcgaaggacgggctgtggcgagtaatttggctaaccacccgataacggagcggcggtgttctcacgataccgacactctcaccagatagcagcgcagcaattgcgctggcagttactgcaaactggcgaagatcgttttgcccaaagggcaacgctttgccaagttccagcgtacaggccagcgcgccaaaatgtctggcgctgaaatgggtaaacgtaccaccaggttcctgatggaacaccagcgcctccagccccgccgcacccagccacgtcagaaatttctcgtcccagggaatgtcgcgttgcggtaatacaccgaactgcggatgcaaggagccacgaattgcggtatgtagatcaaggtgccagcgcacagattctttgccctggtcataaaaatcttccaggcactgttccagttcgcgcgcccgacaggtttctccgctttcagcaaatagctgccaacgaccgccaaacattcgattcatatcgctatggcaataacgtttcccttgcttcagcgcaggaggattcccgaggatcaccagcaaccgccaacgtaacgggatctcgccgtgagatatcgcgccaagcaacgcgtccagcatctccacaggtgccgtctcattaccgtgtattcccgcactaatcaccagtgcgccttgcggtggcgttaatggcgtcagttccagcacaccatcgcccagccagcgccagcgaacgccgttgatttctcgctcggtgataaccggttttttacccgttaaggtcagagcaagaaaattatccattgccccctccctcgcgctggaacggataaacgctaccgagattcagtaattggctcaatacatccagtgcttcccgcccttcgcgcagcaattgcgggtcggccagatcggcagcagtaaggcgatcgcggtagtaacgatccacccagtcattgagcgcattaaacagcgtatcgttcatcatcaccgccggattcaccgcccggcgttcttcttctgtcaataccacccgcaaccgcaggcacgccgggccgccgccattcgccatgctttcacgtaaatcaaagacttttagttcgctaatcgggttgtcagcggcaaggagttcattgagataaccccatactccggcgtgttcccgacactcctgaggcagcaccaacatcatggaaccatcatcgcggctcagcagttggctgttaaacagataggtagacaccgtatcagacacggaaacctgagttgccggaacttctatcgccataaaaccattgacccgcgcacgcaggtttgccagtaactgactctggcgagcgaacgcctgttggtggcaaaacagcacctggcggttactcacggcaatcacgtcattatgaaaaacgccctggtcgataacgtccgggttttgctgggcgaaaatcacctgttggggattcacctgattcagccttgccaccgcctcgctggcttcgcgagtctgtcgcgccggataacgggaaggccgggtatcattgccttcttctcgcccgtagacaaaaagttgcatacccggttcaccgtaatgaccgccgagacgattgtggtttgccgccccctcatcaccgagcaacgctacctgtggcaacgcgctatggacgctaaatttctcttcgtcgttaaaaatcgcttttaacaggctttcagtgacgggcgcttccaggctacggtgaaatttattgttcaggttggcaacggtgagatgcactttgccatccagcgtatcggcagatggcgcgatcgttgccgcattggctacccacattgggctagcggaactgacgctggaaagccagtgcggtgcctggcgtgcaactttttccagtacctgctcatcgctaccactgaatcccaactgacgcagcaccggaataaacggacgctcgtgcggcgggatcacggcctgggggaatcccgcatcggcaagggctttcattttcagtaagccctgcttcgccgccagtcgcgggttagacacctgaaaacggtgacgggtagaggcttcattaccaaagctcaggcccgcgtaatgatgcgtcagccctaccagcccgtcgaaattgacttcccaggcgttcatcgcaccacctcatcggaaaaatccagcccggggttaagcgtggcgggcaatgttaagctgtcgctctccaggctcgccatcggccatgcgcagtaatctgcggcataccaggcgctggggcgatggttaccggaagcaccaatgccgccgaatggcgcggtactggcagcaccggtaagcggtttgttccagttaacaatccccgcccgcgcctccagcaacagttgatcgaacttttcccgctcgggggaaaccagaccgcaagagagtccgaagcgagtgttattcgccattcgaatcgcttcatcgaaagtatcataacgccagacgcgcaataacggtccgaacacctcttcatctggtacgccagcaacgcctgtcatttcaatgatccccggcgtcagcaagcttgtccctgcttgtaataagcgcggcgcaagcaggggtcgtccgcccatcgcttccagttgctgccatgcagtaaccacctgctgtgcggcctgttcagaaatcagcccgccaataaacggctgcggttcgtcatcccagttgcccggcgttaatcgctggctgacggcaaccagacgagcaagaaacgcatcgccctgcgccccgcttttcagcaataaacggcgggcgcaggtgcagcgttgaccggctgtgacaaacgcgctctgaatggtcagatggacagccgcgtcgatatccgccacctcatcgataattagcggattattaccgcccatctcaagggcgagaattttctccggctgaccggagagctggcgatgcaactggtagcctgtattggcgctaccggtaaacagcaaaccgtcgagatcctccagcgcactcagcgcctgacccgtttcacgcccgccctgcaccaggttcagcacgcctggcggcaagccagcctgctgccataaacgcattaccgcttcgccactccacggtgtcagttcgctgggtttaaagataatggtgttacctgccagcaatgccggaacgatatgtccgttcggcaaatgaccagggaaattatacggcccaaacaccgccagcacgccgtgcgggcgatgtcgcaggctcgccgcgccgtccggcatttcactacgctgctcgccggtacgaacgtgatacgccttaatacttatcgcgattttattgatcatcgccgtcacttcggttgccgcttcccagcgcggcttacccgtttctctggcaataatcgcggttaattcggctttattgctttccagcagtgcggcaaagcgttcgacaacggcatgacgttcagcaaaactaagccgcgcccagcgcggaaacgccgcacgggctgcccgacaagcctgctcgacctgagcggcatcggcatcattgccttgccataacacctcgccgcttaccggattacgcttcacacggcttgcgccctggcccgttatccagtcaccgttaatccataaagtcatgctgttttctcctctgcgcacaggcgcaccagacgaacgcgatccccggcgtggcatttgagggcatccagttgtgcggcggttaaaatcaaacgctcggttgccggatcggtacgcaccagcaccacgcggaaatggtgataattttcattggcgaccaggcaggctgggaaatcgccctgcgcaggctgcccttctgccacttccaccagccgacttttacggatggcgcgcacgcggtcgatgtcacactcaagcgtcggcccaccgtcaaagatgtcgatatagttacggtagcgaaaaccttctttctccagcaccgcgcgggcaggcgcggtttgcggatgtacctgaccgatgacgtcctgggcttcctgggataaaaagtgggtatagatcggatgtttcggcatcagttctgcaataaatgccttttgcccggtgccgcagagaaaatcggcgcggctaaaatccatgctaaagaagcgtttaccgaggctttgccagaacggactatagccgtgttcgtcaatcaccccgcgcatttcagcaaccactttgtcattaaacttgtcgcgaaaagccgccataaacataaagcggcttttgctcagcaaatagccgttgccctctttgcgccagtccgggtcgagaaacagcgtgcacagctcgctgctgccggtgtgatcgttactgagaaacagcgtcggcaatgcgttatagacattcagctctttactggcgtgaaccaacgtgccgacgcgatagttgtaccagggatcgttcagcccaaccgccacctcaatggcacaaatccccgccacggtgcctgtctcgctatcttccagcacgaacacatagccctgctcacttttgggcagttcgccttgccaggttttgattgccctttcgatacgcgcgctaagcgtggcttcattggcgggaaggctcgtcaggccgccgcccgttttgctggcaagctgcatcagcgcgctgacatcacttcgctcaacgggacggatgaccatcatgatgaacctcggctaacaaattatttcaactactacctcggctaacaaagtgttcgcaagcagctgcaaagcgatccagtccggtcgtcacctcttcttcgctgacattgagcgcaggcgcaaaacgcaccacgttgccacccgcaatcagtaccatcacgcctgctttcgccgcttcctgagagatctgtttcgcttgcccggcgtaatcggcattcagtacacagccaatcagcaaacctaagccgcgaacttcactgaacaaaccatagcggtgattaatagtattaagacgctcaacaaaccagtcgtgacgctgtttaacgccattaagcatctctggtgtgttgatgagctccagcactttgcctgccaccgcgctggccagcggattaccgccataggtggtgccatgagtgccaacggtcatcacgcgggcgcactcttcggttgccaacaacgcaccgaccgggaaaccgccgcccagcgctttggcggtagttaacagatcaggcgtcacgccgtagtgcatataggcatacagttccccggtgcgcccgacgccggtttgtacttcatcaaaaatcaacagcgcattgtggcggttacacaattcacgcagaccttgtaaaaacgcgttgctggctggcaccacaccgccttccccctggatgggttcgacaatcaccgcacaggtagagtcgtcaatcagcgcgctggcagagttaatatcgttatatgcagcatgacgaatatccgccggcagtggcgcaaaatcctgactataggctggctgcccacccgcactgacagtaaacagcgtgcgaccatgaaacgcatttttgaacgccacgatgccgctcttatggctgccgtagcggtcgtgagcgaatttacgcgccagttttagcgccgcttcgttggcttccgcaccggagttacaaaagaagacgcgatcggcaaacgtggcgtcgatcaattttttcgccagtcgcagtaccggctcgttggtgtaaccgttgccggtatgccagaacttactcgcctgttcgttcagcgcttcacgcagttccggatgcgcatggcccagcgcgttcaccgcaatgccacccgcgaagtcgatatactctttcccctgctgatcccacaagcggctaccttcgccacgtaccggtataaagggtgccggagcgtaaacaggtatcatccattcatcaaagttttcacgcgtaattggctgagacatagcgacctctacagtaaataattcgttatttatatgttaataataagtaatgtttgcgctgtaaatgtagattgcagggttcgtgccagccagtgataaaagtgcataaacggcggaggctaactggaaatcaaggagttataaccaaaccatatgcatttaaagtgcatataaagtgaatacgtttgcgatgtgggtgaataaaaagaataaaaaacgcaatgttatgcagaagtaaaatataattctggaattgtgatcattgacgaaatttactggaaattactgcgccattctgacgcagcgcgcaccaaaagcgggcattttttgcgccatcgttgacatcattaacaaccatcgatcaaatcacttaacaacaggcggtaagcaacgcgaaattctgctaccatccacgcactctttatctgaataaatggcagcgactatgaaatttgtctcttttaatatcaacggcctgcgcgccagacctcaccagcttgaagccatcgtcgaaaagcaccaaccggatgtgattggcctgcaggagacaaaagttcatgacgatatgtttccgctcgaagaggtggcgaagctcggctacaacgtgttttatcacgggcagaaaggccattatggcgtggcgctgctgaccaaagagacgccgattgccgtgcgtcgcggctttcccggtgacgacgaagaggcgcagcggcggattattatggcggaaatccccagtctgctgggtaatgtcaccgtgatcaacggttacttcccgcagggtgaaagccgcgaccatccgataaaattcccggcaaaagcgcagttttatcagaatctgcaaaactacctggaaaccgaactcaaacgtgataatccggtactgattatgggcgatatgaatatcagccctacagatctggatatcggcattggcgaagaaaaccgtaagcgctggctgcgtaccggtaaatgctctttcctgccggaagagcgcgaatggatggacaggctgatgagctgggggttggtcgataccttccgccatgcgaatccgcaaacagcagatcgtttcagttggtttgattaccgcagtaaaggttttgacgataaccgtggtctgcgcatcgacctgctgctcgccagccaaccgctggcagaatgttgcgtagaaaccggcatcgactatgaaatccgcagcatggaaaaaccgtccgatcacgcccccgtctgggcgaccttccgccgctaatttagcagctctcctggctcaaactgggtcaggagaattaaccttgagaaaaatcaacaaactgtcagtaatgatttgttgcctgccgtcctttgttataccgtctctgcgtttttagttgtctgaccacttctctattatcaagtttgatataggaaactccacgatgaacgctgagcgtaaatttctttttgcctgtcttatttttgcgctggtcatttacgctatccacgctttcggtttattcgatctgctcaccgatttaccccacttacagacactcatccgccagagcggatttttcggctatagcctctatattctgttattcatcattgccaccctcttgctgttaccaggaagcatactggtgatcgcgggaggaatagtttttggcccgctcttagggacactactcagtttaattgccgccacgctggcctccagctgcagtttcctgctggcgcgctggctgggacgtgatttactgctgaaatacgttggccatagcaataccttccaggccattgaaaaaggcattgcgcgtaacggtattgattttcttattctgacccgcttaatcccgttgtttccttacaatattcaaaattacgcttacggattaaccacaatcgccttctggccttatacccttattagcgcactcacgaccctacccggtattgttatttataccgtgatggcaagcgatctcgccaatgaaggcattacgctgcgctttattttacaactctgtctggcgggcctggcgctgtttattctcgtccagctcgcaaaactctacgcccgacacaaacatgtggatctgtctgctagccgccgcagcccacttactcacccaaaaaatgaaggataaaacgatgttgcaacattatagtgtgagttggaaaaaaggactggctgcactctgtttactggctgttgctgggcttagcggctgcgatcaacaagagaatgcggcggcaaaagtggaatacgacggacttagcaacagccaaccgctgcgtgtcgatgccaataaccatacggtaaccatgctggtgcaaattaatggtcgtttcctcaccgacgacactcgtcacggtattgtgtttaaagatggctccaacggacataaaagcctgtttatgggttatgcgaccccgaaagcattttatgaagccctgaaagaggcaggtggtacgccgggcgaaaacatgacgatggataataaagaaacgactcatgtcacaggcagcaaactggatattagcgtcaactggcaaggggcggcaaaagcgtattccttcgatgaagtgattgttgacagtaatggcaagaaactggacatgcgctttggcggtaatttaacggcagcagaagagaagaaaacgggttgcctggtgtgtctggatagctgcccggtcggcatcgtcagcaatgcaacatacacttatggtgcggttgaaaaacgtggtgaagttaaattcaaaggcaatgccagtgttctcccggcggataacacgctggcaacggttacctttaaaatcgccgaataaagccaggataaaggatgatgatgatgcaaagccgaaaaatctggtactaccgtataaccctcatcatcctgttgttcgctatgctgctggcatgggcgctgcttcccggcgtccatgagtttatcaatcgcagcgttgcggcgtttgccgccgtggaccaacagggtatagaacgctttattcagtcttacggcgcactggcggcagttgtcagcttcttgttgatgattttgcaggccattgctgcaccgctacctgcgtttttgatcacctttgccaatgcgagcctgtttggcgcgttctggggcggcttgctgagctggaccagtagcatggccggcgcggcgctgtgcttttttatcgccagagtgatgggccgcgaagtggtggaaaaattaaccggcaaaaccgtgcttgacagtatggacggctttttcactcgctacggcaaacacaccattctggtctgtcggttattgccttttgtccctttcgatccaatcagctatgctgccggtttgactagtatacgttttcgcagcttttttatcgccaccgggcttggtcagttaccggcaactattgtttattcctgggcgggcagcatgttaacaggcggtactttctggtttgtcaccggactgtttattctgtttgccctgaccgtggtgatttttatggcgaagaaaatatggcttgaacgccagaagaggaatgcctgatgggtttaccgccgcttagcaaaattcctttaattttacgtccacaggcgtggctgcatcgtcgccattacggcgaggtgctaagccccattcgctggtgggggcggatcccgtttatcttttatctggtgagcatgtttgttggctggctggagcgcaaacgcagtccgctcgatccggtagtacgaagccttgtcagcgcgcgcattgcgcaaatgtgcctgtgtgagttttgtgtggatatcaccagtatgaaagtcgccgagcgcaccggcagcagcgataaactgctggcagtggctgactggcggcaaagcccgctctttagcgatgaagaacggctggcgctggagtacgccgaagccgcaagcgtaacgccgccaacggtcgatgatgccctgcgtacccgactggctgcgcattttgacgctcaggcgctcaccgaactgacggcattgatcggcctgcaaaatctgagtgcccgttttaattctgccatggacattcccgctcaggggctgtgccgtattcctgaaaaacgttcttaaggagagatgatgcgccattgtgggtggttgctgggattgttaagcctgttttctctggcaacacatgccagtgactggcaagaaattaaaaatgaggccaaagggcaaaccgtctggtttaacgcctggggcggcgataccgcaattaaccgctatctcgactgggtgagcggcgagatgaaaacccattacgctataaacctgaagattgtccgtctggcggatgccgcagacgcggtgaagcgcattcagaccgaagccgcagccggacgtaaaacgggcggcagcgtggatctgctctgggtgaacggcgaaaacttccgcaccttaaaagaggccaatttattacaaacgggctgggcggagactctgcccaactggcgctatgtcgacacacagctgccggtgcgggaagatttttctgtgccgacacaaggtgcggaaagcccctggggcggcgcacaactgacgtttatcgcccgccgcgatgttacgccacagccaccacaaacgccgcaagccttactggagtttgctaaagccaatcccggcacggttacctatccgcgcccaccggactttaccggcacggcgtttcttgaacagttgctgattatgctgacgcccgatcccgccgcattaaaagaagcgccggacgatgcgactttcgcccgtgtcactgctcccttgtggcaatatcttgatgtgctgcatccgtatttgtggcgcgaaggaaaggatttcccgcctagtcccgcgcggatggatgctctgctgaaagccggcacattgcgcctgagcctgacctttaaccccgcgcatgcgcagcaaaaaatcgccagcggcgatttgcctgcaagcagttacagttttggctttcgcgaggggatgattggcaacgtgcatttcgtcaccattcctgccaacgcgaatgccagtgctgcggcgaaggtagttgccaatttcctgctcagtcccgatgcgcaactgcgtaaagcagatcccgctgtctggggcgatccttctgttctcgatccgcaaaaactgcctgacgggcagcgcgaaagtttgcaaagtagaatgccgcaggatctgccgccggtactggctgaaccgcacgcaggttgggtaaatgcgctggaacaagaatggctacaccgttacggtacgcattaatctttttgctgtgggcgatggtggcggtgatttatgcaccgctgatcccggcagctctcacgctgataagccctgctttgagcttgacacactggcaggcgttatttgccgatccacagttaccgcaggcattactggcaacgctggtgagcacaaccatcgcggcggtcggggcattgttgattgccctgctggtgattgtggcgctgtggcctgggccgaaatggcagcgtatgtgcgcccgtctgccgtggctgctcgccattccccatgtggcttttgccaccagcgcccttctgctctttgctgacggagggctgctttatgactatttcccgtatttcactccgccaatggaccgatttggcatcggtctgggcctcacccttgcagtgaaagaaagcgcatttctgctgtggatcttagcagcagtattgagcgaaaaatggctgttgcagcaggtcattgtgctggatagcctgggctacagccgctggcaatgcctgaactggctgctgttgccctccgtcgcgcctgcgctggcaatggcgatgctggcgattgttgcctggagcctgagcgtcgtggatgtggcaattattctcgggccaggtaatcccccgacgctggcggtaattagctggcagtggttaacccagggcgacattgaccaacaaacaaaaggcgcgcttgccagcctgctgttgatgctgttactcgccgcctacgttttgctgagctatctgctatggcgcagctggcggcgcactattccccgcgtagatggcgttcgcaagcctgccacgcctttattgccgggcaatacgctggcgatttttttacccttaaccggtgtgctgtgtgtggttctgctggcgatcctcgcggatcagagcacgatcaatagtgaagcgctcatcaacagcctgacaatggggctggtggcgacattcatcgctttgctcctgttactgctgtggctggaatgggggccacagcgtcgccagttgtggctatggttgcccattttattacctgctctgccactggtggcgggccagtacacgctggcgctatggctgaaactggatggaagctggacggcggtggtctgggggcatctgctgtgggtgatgccgtggatgctgtttatcctgcaacccgcctggcagcgcattgatagtcggttaattttgattgcgcaaacactgggctggagccgggccaaaatcttcttttacgtgaaatgcccactcatgttgcgccctgtgctgattgccttcgcggtgggatttgcagtcggtattgcgcagtatatgccaacgctgtggctgggcgcggggcgttttccgacgctcaccactgaggcggtggcattaagcagcggcggcagcaacggtattctcgccgcccaggctttatggcaactgctattaccgcttattatttttgccctgaccgcgttagtcgcaaaatgggtaggttatgtcagacaaggactccgctaatgctctgcgtgaaaaatgttagcctacgtttaccagaaagccgcttgctgacaaacgttaactttacggtggataaaggtgacattgtcacgttaatggggccgtctggctgtggaaaatccactctgtttagttggatgattggtgcactggccgaacagttttcttgtacaggtgagctatggctcaatgagcaacggattgacatcctacccaccgcacagcgtcagattggcattctttttcaggatgcactgttatttgaccagttcagtgtcgggcaaaatttactgctggcgctaccggcgacacttaaagggaatgcccgacgtaatgccgtgaatgatgcacttgagcgtagtggccttgagggagctttccatcaggatcctgccactttgtctggcggtcagcgagcgcgcgttgctctactacgcgcccttctcgcccaaccaaaagcgttactcctggatgagccattcagccgtcttgatgtggctctgcgcgataattttcgccagtgggtgttcagcgaagttcgcgccctggcgatccccgtcgttcaggtaacgcacgatctccaggatgttcctgctgatagttctgttctggatatggcgcagtggagtgaaaattacaacaaactgcgataacgcaaagtttttctcaatgcgtcagttcagaatggcgcactcaaaactacaatgtcgggattttcgatgaaacgtgtttctcaaatgaccgcgctggcaatggctttagggctggcttgcgcttctagctgggccgctgaactggcgaagcctcttacacttgaccagcttcaacaacaaaatggcaaagcgatagatactcgccccagcgcgttttataacggctggccacaaaccttaaatggcccttctggtcatgaacttgccgccttaaacctctctgccagctggcttgacaaaatgagcaccgaacagctcaacgcgtggatcaagcaacataacctgaaaaccgatgctccggtggcgctgtacggtaatgacaaagatgtcgacgccgtcaaaacgcgactgcaaaaagcaggtttaacgcatatctccatcctgagtgacgcgctaagcgaaccttcccgtctgcaaaaactgccgcattttgagcagctggtttatccgcaatggctgcacgacctgcaacaaggtaaagaggttacggcgaaacctgccggtgactggaaagtcattgaagcggcctggggcgctcctaagctttaccttatcagccatattcccggcgctgactacatcgataccaacgaagtggaaagtgaaccgctgtggaacaaagtttctgatgaacaactaaaagcgatgctggcaaaacacggcattcgccatgacaccacggtcattctgtatgggcgtgacgtatacgctgcagcgcgtgtggcgcagattatgctttatgctggcgtgaaagatgtgcgcctgctggatggcggctggcaaacctggtccgacgcgggactgcctgttgagcgcggaacgccaccgaaagtgaaagcggaaccggatttcggcgtgaagatcccggcacaaccgcagttgatgctcgatatggaacaggcccgtggactgctgcatcgccaggatgcaagcctggtgagcattcgtagctggccagaatttatcggtacgaccagcggttacagctatattaaaccaaaaggtgaaatagccggcgcacgttggggacacgctggtagcgacagcacgcatatggaagattttcataacccggatggcaccatgcgcagcgccgatgatattaccgctatgtggaaagcgtggaatatcaaaccagagcagcaagttagtttctactgcggcaccggctggcgcgcgtccgaaacctttatgtacgcacgcgccatgggttggaagaatgtttccgtgtatgacggcggctggtacgaatggagcagcgatccaaaaaatccggtagcaaccggtgaacgcggcccggacagtagcaaataacattgcaattactgacgctggaggctcttcagcgtcagatacccactccacacccgcgtaaaggtcgtcatccagcacaacgcaccgaagatccacgcaaaccacgcaaaccatgcagggaataaacatcccagcacaaacagtaagatcgtttctgtgccttcggttaatccccccagatagtaaaagctcttatgtgcataaccggggttatcaatctgatgttttgctgccagtgcagcaaaggcgagaaaactgctgcccgtgccgataaacgcaaacaacaaccagccgcctgccagcgcattttgctccggtgcagcaagaataaagccaaacggcaccagcgcgtaaaagagaaaatcgagagaaatatcaagaaagccgcccgcgtcggtaagctctctgcgccgcgccagcgcaccgtccagaccatcaagcagcctgttcaacaaaatgacgactagcgccgccagataccagcccagcgccagaaacggcagagccagcacgccgatggcaaatcccactaatgttaaaccatctggcgtaatgcccggtttatcaagaacccgcacgcactgatgcaacaacggtttaatccggggatgaagatggcggtctagcacaggcactccttaaatataaagcctttctgattgagcaacagtgcggatattatggcatttttcgcttatctgcccgtgtgtaatttatgaaaatgattgaagttgttgccgccatcattgaacgtgatggcaaaattttactcgcgcaacgccccgcccagagcgatcaggcgggattatgggagtttgccggtggtaaagtcgagccggatgaaagtcagcggcaggcgctggtgcgtgagttacgcgaagaactgggcatcgaagcaactgtgggtgaatatgttgccagccatcagcgagaagttagcgggcggattatccatcttcatgcctggcacgtacccgacttccacgggacgttacaggcacatgaacatcaggcgctggtctggtgcagtcctgaagaggcgctgcaatatccgctggcccctgctgacattccattattagaggcgtttatggctttacgcgccgccagaccagcggattaattatggctttacgcgccgccagaccagcggattagtgctaagggttttgtcatcacgctggcattgcagcagtattccttcggctttaattaccgccccttcagaataattttgatcctgataaacgcagcactgagtacagggctgcgcactctgcccgccactactgaacacttctggcggtacgtttacctccacgtccggacgataatgcgggttagccagtgcaattaatggaaatgctaatactacggcgaacaatgctcgactcacagggaactccttaacgttattgtctctgctactgataacggtagccgggtggcaaaactttagcgtctgagttatcgcatttggttatgagattactctcgttattaatttgctttcctgggtcatttttttcttgcttaccgtcacattcttgatggtatagtcgaaaactgcaaaagcacatgacataaacaacataagcacaatcgtattaatatataagggttttatatctatggatcagacatattctctggagagtttcctcaaccatgtccaaaagcgcgacccgaatcaaaccgagttcgcgcaagccgttcgtgaagtaatgaccacactctggccttttcttgaacaaaatccaaaatatcgccagatgagtttactggagcgtctggttgaaccggagcgcgtgatccagtttcgcgtggtatgggttgatgatcgcaaccagatacaggtcaaccgtgcatggcgtgtgcagttcagctctgccatcggcccgtacaaaggcggtatgcgcttccatccgagtgttaacctttccattctcaaattcctcggctttgaacaaaccttcaaaaatgccctgactactctgccgatgggcggtggtaaaggcggcagcgatttcgatccgaaaggaaaaagcgaaggtgaagtgatgcgtttttgccaggcgctgatgactgaactgtatcgccacctgggcgcggataccgacgttccggcaggtgatatcggggttggtggtcgtgaagtcggctttatggcggggatgatgaaaaagctctccaacaataccgcctgcgtcttcaccggtaagggccttagttttggcggcagtcttattcgcccggaagctaccggctacggtctggtttatttcacagaagcaatgctaaaacgccacggtatgggttttgaagggatgcgcgtttccgtttctggctccggcaacgtcgcccagtacgctatcgaaaaagcgatggaatttggtgctcgtgtgatcactgcgagtgactccagcggcactgtagttgatgaaagcggattcacgaaagagaaactggcacgtcttatcgaaatcaaagccagccgcgatggtcgagtggcagattacgccaaagaatttggtctggtctatctcgaaggccaacagccgtggtctctaccggttgatatcgccctgccttgcgccacccagaatgaactggatgttgacgccgcgcatcagcttatcgctaatggcgttaaagccgtcgccgaaggggcaaatatgccgaccaccatcgaagcgactgaactgttccagcaggcaggcgtactatttgcaccgggtaaagcggctaatgctggtggcgtcgctacaagcggcctggaaatggcacaaaacgctgcgcgcctgggctggaaagccgagaaagttgacgcacgtttgcatcacatcatgctggatatccaccatgcctgtgttgagcatggtggtgaaggtgagcaaaccaactacgtgcagggcgcgaacattgccggttttgtgaaggttgccgatgcgatgctggcgcagggtgtgatttaagttgtaaatgcctgatggcgctacgcttatcaggcctacaaatgggcacaattcattgcagttacgctctaatgtaggccgggcaagcgcagcgcccccggcaaaatttcaggcgtttaactgtatttaacggaacttgctccccacggaacatttcttatgggccaacggcatttcttactgtagtgctcccaaaactgcttgtcgtaacgataacacgcttcaagttcagcatccgttaactttctgcgatagcagcagatatgccagtaaagaaatcccatttgactatttttttgataatcttcttcgctttcgaacaactcgtgcgcctttcgagaagcaagcattatataatgccaggccagttcttcttcaattgtcccgttttgaaaagctgtgctacttatgctgatcatccaacttaattccgccgcccatattagcttcgcgctggatttaccggagctatgattagcgcaatcagagatatagtcactgggaaaaacagcaaatttattcaacaaggcgataacctgctctggggcttcctccatgtttgctttaaaggtattggctccatggtcgccagaaagaaaatgctccattaaggcacaataactttcgctatcttcgataccccattgatcctctaaagactcgcgtcttttacttatgatatcgatgctgtcaaaaggaagcacatgatattggaaggtatctttgccaggttcaggctttcgcggccagaactccagcgtttcagaccattgcttatgatagaatcgataaggtgcgatcaattgtagcgcctgtaacttctcgatactgagcggctcaatacctttagcctgataataatgcagttgttctttttttgctttaaaaccggcccgaacaataagccccatcataattaatagataaagaaaagagcatcccgcggtaatcaggcctctttcattcaaaccgttggatgttatcgctgcgaacacaaacattacagcgacaacacatgttaaataaaacccccacttacaaagcagcatggccttattttctttaatcatccgttcaaaattactattaaatatttcccagccattaaaagaatacttctcgctcccaggatggttttgtaataaaacttttttcatcacattccctgttattacatactttagaggcgataattttatccatgcaaaaaaaatatccaacgaattttcttgatccgctggatatttcagaatatgactcgaatagcacgaaagattcactcgcttacgctatcgccccgcttccgacttcatctgctggcggactttttttcgcactacgtttacgcggtgcagcctttttcttatcagcactgccaccactgcccggagccacaatgccgcgaaactgccgcaccggcgtacgtttggcttgatcaataagctgatatagcgtccccaccagcggctgcataaagtcctgatagcgacactgcttttcgctgatttgcgtcagcacgctttcccagtgcgcggtcatgtccggtcgcgtcgccatctccggcaggctatggaatagcgcttttccggcgtcggtggagtggatatagcgcccttttttggtcaggaaaccacgcttgaacaacagttcaataatcccggcacgcgttgcctctgtccccagaccatcggtcgcacggaggatctttttcagatctttatcctgcacaaagcgcgcgatcccggtcatcgcgctaagcagtgttgcatcggtaaaatggcgcggcggctgggtttgccgctctaccacttcacctttttcacacagcaactcatcgcctttcgccaccacaggcagtggcgtgccgtcgttttcttcatcgcgctctttgctgcctaacagcgtgcgccagcctgcttcagcaagaaaacgcgctttagcgacaaatttgcctttggcaatgtccagttcgataacacacttgcggaacaccgcatccgggcagaattgcatcagatactgacgggcaatcaggttatagaccttcgcttcgttctccgtcaggttgatcgcagaactccgtgcggtcggaatgatggcgtggtgcgcatcgacctttttgtcatcccaacagcggttgcgtatatctggatctaccactggctgcggcaacagatccggtgcatgaacactgatggcattcatcaccgcgtggcgtccggcaaaatgttcttctggcaaatagcgacaatcagaacgcggataagtgattagcttgtgcgtttcgtacagtttctggcagatatcaagcacgttctgcgcactcagaccaaaacgttttgccgcttcaatctgcaacgcactaaggctaaaaggcagcggcgcggattcactttcccgtttatcgttatagctggtgacaatagccggttgaccactaatgcggttaaccacatgctccgccagtggacgatgtaacaagcgcccttcttcatcctggtacggttcacacgcttcgctcggttgccagatagcggtaaaccgctcatcggcaggtgtcacgatatgtgctttgacttcaaagaagtctttcgccacgaagttttcaatctcttcatcgcggcgcaccaccagcccaagcacgggcgtctgcacgcgtcccacggaaagtacgccctgataaccggcattgcgaccgagaatggtatacgcacgggtcatattgatgccgtacagccagtcggcacgcgctcgcgccagcgcagaaacgcacagcggtacaaactcactgttggaacgaagacggtcgatcgcccgctcaaccgcctgcgggttcaggtcgtttatcaagcaacgctgtacctgctggcgcttttccggtgccagttgcagatagtccagcacttcatccaccagcaattgcccttcacgatccgggtccccggcgtgaacgatttcgctggcttcatgcaggaaccgtttgatgacgttaagttgtttggtcacggagggtcggggctgtaattgccacttttccgggacaatcggcaaatccgcaagattccagcgcgcatagcggctgtcgtaggcgtctggctgcgcctgctcaagcaggtgaccgatacaccaggtcaccacctgaccattaccgcactcgataaagccatcgcctttccggtgcggtttgggcaggacatcagcaatggcgcgcgccagactcggtttttcggcaataaacaaccgcattgaattaacgaatctcaaccatggcacgaccgccgcgcgctggcaccagttcgccaattgccgtcagttcaatgccaaactcggcggctgtagctttgacctcattttctgcttccggcatgaccgccagcagcaaaccgccagaagtttgcggatcacacagcagatcgcgcacttcacgcggcatttcacccatcagatgaccgtagctggcaaagttacgttcagtgccgccaggtactgcgcccaacttaatgtactcttcaacaccggggagtttcgggatcgcttcatagtcgacgcgtgcctgcacaccagccccctgacacatttcgctcaagtggcccagcagaccaaagcccgtaacgtcggtcatcgcttttacgccttcgatgttggcaaaggacgcgcctgcgatgttcatccggcacatcacttccgtcgccagtccctgatgttctggtttcaacagactttttttctcagccgtggtaagaacgccgatccccagcggtttcgtcaggaacagtttgcatccggcttgtgcggtactgtttttcttcacccgctcggtcggtacgatccccgttaccgccagaccaaaaatcggctccggcgcatcgatggagtgaccgccagccagcgcaatacccgcctgacgacatgcatagcgtccaccttcggtcacttcgcgggcaatttctggggaaagtttgttaatcggccagccgaggatcgcaatcgccataatcggtttgccccccatcgcgaagatatcgctgatggcgttagtcgccgcaatgcggccaaaatcgaaaggattatcaacgatcggcataaagaagtcggtggtactgataacgctggtgccattgcccagatcgtacaccgccgcatcgtcgcgggtttcattacccacaagcaaattcggatcaacaaacttcgcctgctcactatgcaggatggtttccaacacttttggggaaattttacagccgcaaccagctccgtggctgtattgggtcaaacgaatgctgttctcgctcatggacatctcctgtcaatgcaatccgggtatggtaaccctcattccgtgaagtgataagtgagagtgtctgaattcctgcgcctttgctcacaatccagacagtttcgcgacaattatcagaaataagttacaaacggcgtcgggtccgggacgttaatgctcgtagatgctttcagctgcggcgtaccgaggtagagaaaaccgacaattttatcctgctcacggcaaccgaatgcttcacgcactaccggactttcagttaatgcgccactgcgccagatgccgccaaacccctgggcaactgctgccatttgcatcgccatgaccgcgcatccggcagacatttcctgttcccagcgcgggactttatgattctcttcgcatttcgccaccaccgtgatgatgagcggtgcgcggaacggcgcattacgggctttgtcgatagctttgtcatcactaccggcagcaatcgccccctgttccagtacggcgctgaaacgctcgcgcccttccccttcaatcacaaaaaaatgccacggttgcatggacttatggtccggcgcacgcatacccgcacgcaggatgttttgcagttgttcacccgttggcgcgggttcagccaagcgggaggcgctacggcgattgatcaatagttcgagtgcatccatttgattaactcctgtcgtgatatttattcacaaaattaacacgagagtggattttgttacagcacagtccgcaattcctgctgacaagtaccggttgggtcattacgataaccacatctattgcgcctgtgacaggtgtgaccttaagttgggagaatacatgcgaaccctttggcgatttattgccggattttttaaatggacgtggcgtctgctgaatttcgtccgtgaaatggtacttaacctgttctttattttcctcgtactggttggtgtggggatttggatgcaggtcagtggtggtgatagcaaagaaacggccagtcgtggcgcactgctgctggacatttctggtgtgatcgtcgataaacccgacagttctcagcggtttagtaaattaagccgccagctgcttggtgccagttccgatcgtctgcaggaaaacagtctgtttgatatcgtcaacactattcgccaggcgaaggacgaccgcaatatcaccggtattgtgatggatctgaaaaacttcgcaggcggcgaccaaccgtctatgcagtacatcggcaaagctctgaaagagtttcgtgacagcgggaaaccggtttatgccgttggcgagaactacagccaggggcaatattatctcgccagtttcgccaataaaatttggctgtctccgcaaggcgtggttgatctgcacggctttgccaccaacggtctgtactacaaaagcttgctggataagctgaaagtttccacccatgtgttccgcgtgggtacgtataaatctgccgttgaaccgtttattcgtgatgatatgagtccggcagcccgcgaagctgacagccgctggattggtgagctgtggcaaaactatctgaatactgttgccgctaaccggcagatccctgctgagcaggtattccctggcgcgcaagggttgcttgagggtttaaccaaaaccggtggcgataccgcgaaatatgcactggaaaacaagctggtcgatgcactggcaagcagtgcggaaatcgaaaaagcactgaccaaagaattcggctggagtaagactgataaaaattatcgcgccatcagttattacgattacgcattgaaaacgccggcagataccggtgacagcatcggtgtcgtctttgctaatggcgcaattatggatggcgaggaaactcaggggaatgttggcggtgataccactgcggcacaaatccgcgacgctcgccttgacccgaaagtgaaagcgattgtcctgcgtgttaatagcccaggcggcagcgttaccgcgtctgaagtgattcgcgctgaactggcagcagcccgggcagcgggtaagcctgtggttgtaagcatgggcggcatggcggcatctggtggttactggatttccacgccagctaattacattgtggctaaccccagcaccctgaccggttctatcggtatcttcggcgtgatcaccaccgtagaaaatagtctggatagcattggtgttcatactgatggtgtcagtactagtccgctggcggatgtttctatcaccagggcactgccgccggaagcgcagctgatgatgcagttaagcattgagaatggctataaacgctttatcacgctggttgctgatgcgcgtcatagcacgccggagcagattgataaaattgcccagggccacgtctggaccggtcaggatgcaaaagctaacgggctggtcgatagtctcggggatttcgatgatgcggtcgccaaagcagcagagctggcaaaagtgaaacagtggcatctggaatattacgttgatgaaccgaccttcttcgacaaagtgatggacaacatgtctggttctgtccgggcaatgttgccagatgcgttccaggccatgttacctgcaccgctggccagcgtagcctctaccgttaaaagtgaaagtgacaagctggccgcgtttaatgacccacaaaaccgttatgcgttttgcctgacctgcgccaacatgcgttaagtcttgtactgagtggccgacagatcgtcggccacattattttttacgtcgacgaatcctcttcccgctgtttcgccccatatttccttatccgcatagtatcaggtgcgctccccctgcctcacgtatatacttttgctctttcgatatcattcatatcaatatcatgcaaaagaaaagtatttacgttgcctacacgggcgggaccatcgggatgcagcgttccgagcagggttatataccggtgagtggtcatctacaacgccaactggcgctgatgccggaattccatcgcccggagatgccagatttcaccattcatgaatatacgccgctgatggattctagtgatatgacgccggaagactggcagcatattgctgaagatattaaagcgcactatgacgactatgatggttttgtcattctgcacggcaccgacacgatggcgtataccgcctctgcgctgagcttcatgctcgagaatctcggtaaaccggtcattgtgacagggagtcaaatcccgctggctgagttacgctctgacggacaaattaatctgctgaatgcgttgtacgttgcggcgaattatccgatcaacgaagtaacgctctttttcaataaccgattgtatcgcggcaaccgcactaccaaagcccatgccgatggttttgatgcgtttgcctctccaaaccttcctccgttactggaagcaggtatccatattcgtcgtttgaatacgccacccgccccgcacggtgaaggggaattaatcgttcatccaatcaccccacaaccaattggcgtagtgacgatttatccagggatttctgctgacgtcgtgcgcaattttctgcgccaaccggtgaaagcattgattctgcgctcctatggcgtgggtaatgcgccacaaaacaaagccttcctgcaggaattacaagaagccagcgatcgcggtattgtggtggtcaacctgacacaatgtatgtccggtaaagtgaacatgggtggttatgccaccggtaacgccctcgcccatgccggcgtaattggcggtgcagatatgactgtagaagccacgctaaccaaactgcattacctgcttagccaggaactggatactgaaaccattcgcaaggccatgagccaaaacctgcgcggcgaactgacgccggatgattaaggagactgtaatgccccctcgcgccctgttactggtcgatttacaaaatgatttctgtgctggtggcgcgctcgccgtgccggaaggtgacagtacggtggatgtcgctaaccgcctgattgactggtgccagagccgcggtgaagcggttatcgccagtcaggactggcacccggcgaatcacggcagttttgccagtcagcacggtgtagagccttatacgccaggccaactcgacggtttgccacaaaccttctggccagatcactgtgtgcagaacagtgaaggcgcacaattacatccgttactgcaccaaaaagcgatcgcagcggtgttccataaaggcgaaaatcctttagttgacagttacagtgccttttttgataacggccgtcggcagaaaacctctctcgatgactggttacgcgatcatgaaatcgatgaattgatcgttatgggcctggctactgactattgcgtgaagtttaccgtgctggacgcgttacagttaggttataaggtaaacgtgattaccgatggttgtcgtggcgtgaatatccagccccaggacagtgcgcacgcgtttatggagatgagtgcagctggggcaacgctatatacgctggcagactgggaagagacacaggggtaattttacgctggcctacaattctgtactggcattgtaggccaaataaaacacgtcagtggcacatctggcaattgatgccatcaacgaaagatttaattcacctcagaaatctcttccaagctcaccttccgcgtttcgatgccaaaaatggagagaaccagcgcacagagcaataacataacaccaagtaccataaacaccgtgatgctcccataatgtgttaataatgccgcaacgccatagggcgtgaagactgcgacgatccgtccgacggcattaacgaaaccgctaccgcgcaggcgtaaatgcgttggccaaagctccgggatataaaccgcgctcgcgaagcaaacatacatgtataaaaagaagatcatcaccagtccatagattaaaatcgcccactctgtagtctgaatactatagatatagcctaacacggcaataataataagtaaggtggagccaaataaccgacgaggaaaatgatcaataattaatgccgcaataaatattcctaccggagcgccaatcataataacagcggtcattaatatacttttatcgacatcaatgccggagttaacaaatatggtcggtatccatacggtgatggtataaaggctaatgttcattgcaattaaaacagtaatcgcgactaatgtacgtcgtaacatttcacctttaaacaggagccagaaagtacccttgattactttaaccttgctgttgctctgatagctagtaagcgggggtaaacgaatactcttctctctttcaatttgctgctctacttcacgaagttggcattctgcacctgcgatttgccctttccctgccagccatcgtgggctctcgataaagtatttaccactgagaaaccaggctaacagtatgccaataccacccagcagaaacattattcgccaactaaaaaaagcgataaccaccacgcctatcgccgcagacagcatggggctccagttaccaacaaaactgagccgcgcggaccattttccacgcaccgtcgcggggataaactccgtaaaactggcatagccaaccataatcagcgcccccattcctgttcccatcaggaagcgaaagaagatgagccagtacatatcagggacaaaagcggcccctgttgcagcaataccgacgatgagaagatttatgcgaaacgccctgcgccgcccaaagtagtcaccaataaacccaccagtaagactgccgatgaaataaccaaacattaatgcgctggtaaaggcggcattgaggaaattattactccatccattgcttaccagctttgctaagacgacattaccggagtaactcaaaaaccctgttaataacagactaaagcttataataccaaatatacgataatgaaaccgggccaaaggcaagcggtccagtcttgcgccaatttgatcatattgttccattaggtgcctcggatttgctaaaaaggtagcaattgcggcaaattcacttgccgcatctttatcatcattttatttcaaggcgcaggaacaaataatattgacaacgtgtgcttaaattaccacaccagctggatattattgtctttgcaaaatgctatccactctgcacccggacttttatcagttattatgtaattaatatgactaaaatcagctaactggacaaaagctttgcgatcaaacttagagtgatcaaccaataacgcaacttctgtcgcctgacggatcattgtctttttgatttcagcttccgcttcattagagtccagcgcgccgctgttaatatcaagacctttacaactcattaccatgatatcgacatgatagcgcctgatgatctctttagtaattcttccttgcagactaagtgtatttttgtttagttccccacccgtactaacgactttaatttcactctgagccagaacatgaatcgcttccgcgctgttggttagcaacgtcaggccactacggtcctgtaacaatttgagcaattccattacggtactactggaatcggctgccatggtggttttattgtcgataaagggtagtgccttgcgtgcaataagctgcttctcttcataaaagctactagcgcgcttataaaaatggatattctccgtcaacatcgctgtatttaaaacagcaccaccataggttctggtcaaaaagccttcatcttccagcttctcaagatcgcggcgaatggtttcttcggttacctgaaaaatcccactcaaattactgactgtcacctttttatcgttggcaaccatttgcttaattgcctgaatcctgtcttttgccgccacgattacacccctgtatctttttacatcacattagcgcgattatcgcataaccgatgtttactttcaaaataacctgtttgaatcacagattttcatcacagttttcacagaaacagaggtgaatcgtgttgagtatttaacgctccagggcctctgccatttccctcatcaatgttgcgtctgcatcgcttaagttgatattcagtgccgcgacattttcgcgtacctgttccggtgcagtagccccactaagaatggagattaaatcactctgttttaatatccacgccagtgccagagtgggaattgtgcactgataacgagcacaaagtggctgccactgttcaagcatatcaatcactttcagcatgttttcacgctggaaccagactttatttgcccgagcgccgcccggaacgtaatcacgagtgatggtgccggtcaacaatccctgctctagcggggaataaacctgaaccacaatgccattatcacgacatagtggcagcagttcgttttccattgcccggtcgaggatactgtatttcgcctgaataatatccagttcaccatattgcagatactcgcggatatggtcagcatcgacgttagcagcgcctatagcgcgaattttcccttcagactttaactcattaagcactgcgacagtttcagcgatcggcgtaaaaaatggcggcacgctctgccagtgcgtcatgtagatatcgatgtaatcaatacccagacgttgcaagctcgctgctacctcttcgcggatagattccggggaaaggtttttatacaactgccgatcgccaactttgttgaataaacttccttttcgttcccagacaatgccgcatttggtttctactacaacctgttcacggggcagtttttttaacgcctgaccgacgataacttcactattgccaaagttatatcctggcgcagtatcaatcagattaatgccacaacgatgggcttcaagaatcgtatcaatacatatttgccgatcgagatcgccattccatgcaggaccgccgccaatggcccatgtccccaaccccattcggctaagcgtaatatccgttgtgcctaaaggtatctttttcatttgccttcattatccttcgtattcttccagcaattgttcgaccagctttctgttttttacgccggtggtggcaccgacgcttagaacgctgatagccgccgttgcattggcaaagcgtgcgcattcacgcagatttttgccttctaacagtgccgcaataaaaccactagcaaagttatcgcccgcgccaatggtgtcgatggcggttattcctgcgaccgccggcaccttcatcgtcatgtcaccacgcttgataaagcagccgtctttacccgttttaatcaccaccgtttttacgccgcacgcaagaaagcagtcagcaatttcatccagtgtctctttcccggtgagtaattttgcctcggcaaaattaggaaacagataatcgacataactcaatgcttcgcaaatatcatccagcgtttcattcaaccgcggtttgatcatatcggcacagataatcatctgccgggctttagcttgcgtaaaaatttctgttagcgctttaccatccaatagtggactgttgaaaatactggccagacttaataatttcgcctgagaaaaccgcgcaaaatcaacatcgtcaatattcaatttccacagactgccattacggtttgtgacaaacgtccgctcgccatcctccgtcaccagtccaacgttaatagaggtatctatgctgacgtcctgcttcaggctttgaatatcaatattctctttgcggcaatggtcgagaataaattgccctgcggcatctttaccaatacgactcattaatgctgtgcgatggcccagacgagaaataattgttgcttcatttattgcatcacccccggtggtcattgcgattctttcaagaggataagaatccacatcaaagatatttttactgaccggttgcaatggaatatcaacaatagcggcacctatacaaataacgtcgagattatccatatcattattccgctttgccatcagaaccgaacagtttaattttttccaatgcccgttcttttacagctttacgtacttcacgttctaaatgcaggaaaggctgatcctggttttctttcactgcaaccattgcggcctgacagagctccgtatgaatgttgattttcgcgatacccaagctaattgcagttttaatgtcggcatcactgatcccgcttgcaccgtgcaaaaccagcggaacagaaacggcatcgcgtacgcgtttgacgacctcaaagttcaattgtggctcactcgtataaaccccatgctggttgccgatggcgacagccaaactatcacagcccgtacgttcaacaaattcagccgcctggtcaggatcggtatagtgatagcccgccagcgcttcctcataaacggtttcattaccgacatgccctaattccgcctctaccggaatacccagcggatggaagaaatcgacagcctctttggttaaacgaatattttcttcgaaatcaaacgcggaagcatcacgcattaaactattcataccatgagtccaggcgttatgaataatctccatactccgaccatgatcccaatgagttattaccggcaccgttgctttttgtgccatacttaccatcatgtgagagaaatcttcaaaactggtgttaccgacaaaacctgtaccaaaagaaataataaccggggatttcgcttcttcggctgcgtcgataacgcccatcaacatttctgcattccatacgttaaaatgggcaattgcataatgtttatttgtggcatcgttttcccaatatctgatatctgcgagcatgttctgttctcccgtattaattaatcgctaattttaataacgcctttaataatgtcgcgtttgttgttaacactctcttcaaatgcctgttgtacatcccgataatcgtaaatatgcgtcaccatgcttttcacatcgaatcgcccactagaaatagcttcaatcgtgaccggataacgattggcatagcggaataccgtctggatagtgacttcgcgattgattttgaggaaattgattgcgctatcgccgggtacagtaccaacaatcataattttaccgccgcgcattaccagataaggtgcctgtttaacggtgaccgcagaacccgctgtttcgaaaacaatatctgcgcccatgtcttcggtaaattgctgacagcgtgcaatagtgtcttcttttgcgccgttaataaccactgtcgcaccaagctgttccgccattgccagacgtttttccagcacatcaacgacggcaatttccgttgctcccaggcatttgcacgcttgcaacgtcatcaaaccaatacaacctgctcccagaataattatcttcttacccggtttaacatctgccagcatcgcggcatgcatcccgactgcggcaggctccaccagcgccccttccatcgtgtccatattgtcgggcagtttgtaagtaaagctctccggatgacacagatagtgcgttaatgcgccgcggtagttgggttgtgtcgccataaaatcaacgtccgggcagatgttatatttgccttccagacagtaacgacagtgaccgcaaggaacgccaggttcgatatttacccgatcccccggtttaaatttgcgcacgcggcttcccacagccacaaccgtcccggcgcattcatgacccaggccaatttcttgatttgggtctttaggcggaataaacgggccactttcaaaaccatgtacatcactaccacaaataccgacatattctactttaatcaaaacttcatcttctttaggcactggtatttctgcactaataattttcattgtgcccggcacctgcaatattgctttactatttttcattttgaatccacccgtattatttattggctactgcatcaatacttaaactttcaacggagacacctttggtttcgattccaatggtggcgatagcaattgcgacaataatactaaccgcccccagaagaataaagactcccgtaacgccataactactgagcagcactgcaacggcataaggtgcggcaataccactgattcgccctaccgcattcgccagaccggagccacggagtttggcctctgtcggccagatttcagggacatacactgcgctggcatagcaaacgtacatatagacgaaagtaatcaggaagaaaccaatcaacgttatgagcaacatactggtttgcagactatagatatatccgagcaccgcaatcaggattaatagccccacacccattgttttacgcggaattttatccatcaccagcatggcaataaaaataccaaatggcgcgccaaacatactcatggtatttaaaacaatgctgtcttttaaattaatcccctgggtcatgaatattgttggcaaccagttaattagtgtgtactgcacaacgttcatggcaatcagcacacaagagcctaatatcacgcgtttcagtaatactcctgtcagtaaggcactatacggcaccgcttgtggcgctttaccgtcatcagcaataaccacaggcggcaaaggtttacccgtctggcgtatgacgccttcttctatactccgcatgactttctcggcttcctgataccgtccgcggctttccagccagcgcggggattcaggaaagtagcgccaggccagcgccgtagcgataaggctcaatattgcagggataagcagttgtacccgccagttccactctgcactaatcagcggcgtgagtcccatcgctatcaaactacagagcggataactccagttgccaataaaggaaacccgactactccacgttccacgatttctaccgggcatatattcggtgaaaccagcaaacagcgtaaccagtaaagctcccagcccaactcccatcacaaaacggcaggcaataaggaaatccatattcggactgaaagcaccgacaaccatgctggcaatatgaatggcctcatagaggatgaacgcatttctgcgaccggttttgtcgccaatgatgccgcccaccagcgcaccgagaaacattccggcggtcgtgattgcactgaatgtggctgtggtggaattatctgtccagcccaacgctttcagctgcgcgaggatcaagccaccaacggcattactccagcagacaagcaagccaaacgcgacgatggcaaacatactactatgccagcggcaatccggtaagcgatccagccgtgcaccacaatgcggttttgttatctgttccatgcgataacgttccttcaggagagtggttattcatcaaagtcgtaagtcatgatcactttgattgcggttttatcgaccatcgcatcaaacccttcgcgccattggctcaggccgatacgatgcgtgatcatcggtttgactttgatagcgccgctggctaatagcctgatagcgttacgccaactggtggagtcataggccatatgcccaatgatgcttttgttccaggcggtaatgtcattaatgctgaaatcaagaggtttgaagcccattccaacgcgtaccacttccccgttcgggcggagcatttcgatggcttgtttcagtgcgatattggcaccggagcattcaatcaccagtcccagattgtctttgccacaaatttgctggcagcgcgccaccacatcttcggtagaaccatttactactgccgtcgcacccagttcttttgcaaccgggaagcggaccgccacatcttcttgcagaccaacgacgacgatatttaccgcccccataattcgcgccatttgtacggagaacagcccgagtgggccagtgccgatgacgaccacatcctgaccaggaaggaatttgctttgctgcgcgatggatttgtaggcattacagatagggtcaagtacggctgcgtcctcataatcaacaccatcagggatttcccacaacgcatgacgatgaattttgagaatttcaccaggaaccagacaatatttggaaaaaccaccgccccaggtattattatccagaccaaggtttactttttctgtacaacacagaaaatcaccttgttcacaggccggacaaacaccgcaaacgtgaccgctgttatcgcttacgacgcgttgccccactttccagtctttgactttttcaccaacctgcgcaatacaacctgcgaactcatggccgcggatagagttaaactcatcagaaccgctatcgacattgtagtgcttcatgtctgcgccgcagattgccgcggctttaatttcaatcactacatcttccgggccacacatgggttgtgggacatcaatcatcttgtagccgccaaaggccttgccaaaccgagccagtgctttcattgcgtcatcctctgtgtttagttttgcttagatggccatcatacttacccacatgatttttgaggtcaacattaaatctgtaaaacacagataatgatctgcgttttacaactcagatcacaattacgcagaaaatggctgggtctgttacaggttgatggaaggcggggcgcaaaaagagcaaattcgagagggattaccggccaaataggtctgagacttaagttcaggagaagtcattcaggtgtgaacgggacggcaagagatcggactgggacttagccaggtcatggcgagataattgagatgagtcgtggggtcattgttggctatccccttcatagccgaggcaaaaaggggatgaaccacttacttaaacatggcaataggctttgcactgataccaaaatcttcttttaactgctgtttgctcttcatgaccatctgaccatttgtgtcaattgtcatatgctgtgcttcgatattatggcgggcttgccacagcatcaccagttgcaggcagttctctttttgttcctcggtcaacgcaacgccatcaggccatttccccagttcaacggcggtgctcaaacgctggtatacctcaggcatcatgctgttgataatgtcatcaagattcataatttttccgctcctgtggaataagttgctgaatcgttttttcaaccgttgatttcttcgccgttttcgccatcggtaaagcgtaaagaggcagagttaacacaataacgttcgcccgttggctgcggcccgtcggggaagacatgccccagatgggcatcacagttaccgcaacgaatttctatgcgctgcattccatgactcaagtctttgatataacgaatggattcttcacttaccggttcgtagaaactgggccagccacagccggaatcatacttggtttgggaatgaaacagcggggcatcgcagatcaaacagtgatatacgccgtcacgcttgttatgcagtaaacgacccgtaaatggcggctctgtcccatgattctgcgtcacgtaaaactgcatctcggacaaattttttttcagttcttctgcgctaggtttattagccatttgctcacatctcactttaatcgtgctcacattacgtgactgattctaacaaaacattaacaccaactggcaaaattttgtcctaaacttgatctcgacgaaatggctgcacctaaatcgtgatgaaaatcacatttttatcgtaattgccctttaaaattcggggcgccgaccccatgtggtctcaagcccaaaggaagagtgaggcgagtcagtcgcgtaatgcttaggcacaggattgatttgtcgcaatgattgacacgattccgcttgacgctgcgtaaggtttttgtaattttacaggcaaccttttattcactaacaaatagctggtggaatatatgactatcaaagtaggtatcaacggttttggccgtatcggtcgcattgttttccgtgctgctcagaaacgttctgacatcgagatcgttgcaatcaacgacctgttagacgctgattacatggcatacatgctgaaatatgactccactcacggccgtttcgacggtaccgttgaagtgaaagacggtcatctgatcgttaacggtaaaaaaatccgtgttaccgctgaacgtgatccggctaacctgaaatgggacgaagttggtgttgacgttgtcgctgaagcaactggtctgttcctgactgacgaaactgctcgtaaacacatcaccgctggtgcgaagaaagtggttatgactggtccgtctaaagacaacactccgatgttcgttaaaggcgctaacttcgacaaatatgctggccaggacatcgtttccaacgcttcctgcaccaccaactgcctggctccgctggctaaagttatcaacgataacttcggcatcatcgaaggtctgatgaccaccgttcacgctactaccgctactcagaaaaccgttgatggcccgtctcacaaagactggcgcggcggccgcggcgcttcccagaacatcatcccgtcctctaccggtgctgctaaagctgtaggtaaagtactgccagaactgaatggcaaactgactggtatggcgttccgcgttccgaccccgaacgtatctgtagttgacctgaccgttcgtctggaaaaagctgcaacttacgagcagatcaaagctgccgttaaagctgctgctgaaggcgaaatgaaaggcgttctgggctacaccgaagatgacgtagtatctaccgatttcaacggcgaagtttgcacttccgtgttcgatgctaaagctggtatcgctctgaacgacaacttcgtgaaactggtatcctggtacgacaacgaaaccggttactccaacaaagttctggacctgatcgctcacatctccaaataagttgagatgacactgtgatctaaaaagagcgacttcggtcgctcttttttttacctgataaaatgaagttaaaggactgcgtcatgattaagaaaatttttgcccttccggtcatcgaacaaatctcccctgtcctctcccgtcgtaaactggatgaactggacctcattgtggtcgatcatccccaggtaaaagcctcttttgcattacagggcgcacaccttctcagctggaaacctgcgggtgaagaagaagttctgtggttgagcaacaacacaccgttcaaaaatggcgtcgctattcgcggtggcgtaccggtttgctggccgtggtttggtccggcggcacaacaaggtctgcctgcgcacggttttgcccgcaacctgccgtggacgctgaaaagtcatcatgaagatgctgatggcgtagcgctgacttttgaattgacgcaaagcgaagagacgaaaaaattctggccgcacgactttacgctgttagcgcatttccgcgtgggtaaaacttgtgaaatcgatcttgaaagtcatggcgaatttgaaaccacctctgccctgcatacctactttaacgtgggtgatatcgctaaggtaagcgtcagtgggctgggcgatcgcttcattgataaagtgaatgacgcgaaagaaaatgtactgaccgatggtattcagaccttccctgaccgtaccgatcgcgtgtatctgaatccacaagattgcagcgtgattaatgatgaagcgctgaatcgtattatcgccgtaggccaccagcatcatctgaacgttgtcggctggaacccgggaccggcgcttagtattagcatgggcgatatgccggatgatggctacaaaacatttgtttgtgtagaaacggcttacgctagtgaaacgcaaaaagtgaccaaagagaaacctgcacatctggcgcaatccattcgcgttgcgaaacgttaatttacgttaatgttgtgtgccgggtgcaatgcatccggcacacaacatcacaccatatccagcgcagtttttccttttggtgccggatatgccttatccagcatagctaattccgcactagaaagttcgacctcaagcacagccgcattttgttggacatgggcaatcgtggccgcttttggaatcgccatcacaccctgatgactgatcacccacgccaacaatacttgtgccgcgctgatattgtgagcatgtgcaatttcgttgactaccgcgttttttaacagtccattgcgcaaccgcccggcctgggctaacggactgtaagccatcaccggcatctgctgttgctggcaccaggggagtagatcgtactcaattcctcgactaccgagatggtaaagcacctgattagtggcacactgatttccccccggcagctgccagagttcctgcatatcagcataatcaaggttagaaacgccccagcggcggatttttccctgggcgatcaatttttccatcgctgcgacagtctcttcaaaagcgaaactgccagaccagtgtaataagtaaagatcgagataatcagtattgagacggcgtaaactggcttcgcatgcatttatcgctttttgcccgccagcattccacggatagactttagagacgagaaagaccttctctcgcagaccggttaatgcttccccaaccaccttttcggcaccgccatcggcatacatttcggcggtatcaatgagggttaaaccgagttcaatgcccgcgcgtagtgcagcaacttctgttttgcgctgactggcatcttcgcccatataccatgttccctgccctacggctggcagactgacatcgccactaaattgaatcattttttgttgcattgtttcctcccaggtattgcaccaccgtaatgcaaaacagggcgtgacgccctgtttttatgcacaaaatgccctggaaagatgcattatcagaatttgtaggtgatcccggtagaaatcaggccagtccaggatttatccaccatcgggctgtcagtaacttcatcagacagacgggtgtagcgtgcggtaccgtaaacactccagtcgccgaggaagttgtagctggcgctcagctccaggtaagggctccagctgtcgttcgggttatagccacgcagaccgctgcgagcggactctttgcggcttacgccataatagtattcgttctggttttcgctgttccactgcacaccaatacccggagtcacggtcaggccaccgttggtgtaacgatacaaccaggccatatcccagacgatgccgttgctgttatccagggtatcgccagccagggtggtacgcaggtaaccgtactgggtaaagtgagcataagacagaccagccatcatggtgctcttacggtcatccaggtgacgcatttggtgatcgccactgtctttcgctttgaagtaaagcgggctccagtaagcggtaatactaagtttatccgttgcgtcattccacaggtagtaaccaccacctaagccacggaaccagaagttatcgccttcatagttgattaccggtactgggtaaacatcggtatcgtaatctttatatgggtgttcaacgacacctacgcctgcgcccagggaaaatttaccttcagcgtgcgctacgcctgcagacgttgcgataagcactccaagtgccagaagtttgagtttggtcacaattaatcattccttaaacaaatgtttagcgggcgacaaagtttacccgtcaatacatcgaaacccaacctttttacgttttcattttttaaagtaactgtttaattttcctgacgcggatgacaccgcgcttacagccaaatgaatttagcgttactggcgagcctggtctttacattaattatgcaaaatttatggatgagttgttgatatgccattgaaattaagaaagccgtgcaggcaagttttccatttgccatctacgcttaattttgaaggtgtatcaccgggcacgttgttctcatcgtcgataaaatggcatgagagttgctgtgttttagcaagagacgtcgttcagtttacctcttccgggagcctctactattcatatgaacggctcttaacctgtgctaaaaaacgaaaggacggcataccatgaatatattcgatcactatcgccagcgatatgaagctgccaaggacgaagagttcacactgcaggagtttcttaccacttgtcggcaagatcgcagtgcttatgccaacgcggctgagcggctattgatggctatcggtgagcctgtcatggtcgatacagcccaggaacccagactttctcgactcttttctaaccgggtcattgcacgttatccggcgtttgaagagttttacggcatggaagacgcgattgaacagattgtctcttatctgaaacacgcggctcaggggctggaagagaagaaacaaatcctgtatctgctggggcctgtgggtgggggtaaaagtagccttgctgagcgactgaaaagtttaatgcagctcgtaccgatttatgtattgagcgcgaacggtgagcgtagcccggtcaacgatcatccgttctgtcttttcaatccgcaggaagatgcgcagattctggaaaaagagtatggcattcctcgccgttatctcggcaccatcatgagcccgtgggcggcaaaacgcctgcatgaatttggtggcgatatcactaagttccgggtagtgaaggtctggccgagtattctgcaacaaattgctatcgccaaaacggaacccggcgatgagaacaaccaggacatctccgcgctggttgggaaagtcgatattcgtaaactcgaacactacgcgcagaatgacccggacgcctacggctattccggtgcgctgtgccgcgccaatcaggggatcatggaattcgttgagatgtttaaagcaccgattaaagtgctgcatcccttgttaaccgccactcaggaaggtaactacaacgggacggaaggtatctccgccctgccgttcaacgggattattctcgcacacagcaacgagtccgaatgggtcactttccgtaataacaaaaacaacgaagccttcctcgatcgtgtttacatcgtgaaggtgccgtattgcttgcgcatttccgaagagatcaaaatctacgagaaattgcttaatcacagtgaattgactcacgccccatgcgcccctggcacgctcgaaacactgagtcgtttttccattcttagccgcctgaaagagccagaaaactccagcatttatagtaagatgcgggtttatgatggcgaaagtctgaaagacaccgatcccaaagccaagagctatcaggaatatcgtgactacgccggtgtcgatgaagggatgaacggtctgagcacgcgttttgcgtttaagatcctctcccgcgtgttcaacttcgatcatgtagaagtggcagcaaacccggtccatctgttctacgtcctggaacagcagattgagcgcgagcagttcccacaagagcaggcagaacgctatctggagttcctgaaaggttatctgatcccgaaatatgccgagtttatcggcaaagagatccagacggcctaccttgaatcctattccgaatatgggcaaaacattttcgaccgttatgttacctacgcggatttctggattcaggatcaggagtatcgcgatccggataccgggcagctgtttgaccgcgagtctcttaacgccgagctggagaaaatcgagaaaccggcggggatcagtaatccaaaagatttccgcaacgagattgttaacttcgtactgcgcgccagagcgaataacagcggacgcaatccgaactggaccagctatgaaaaactgcgcacggtcatcgagaagaaaatgttctccaataccgaggagctgttgccggttatcagctttaacgccaaaacgagtaccgacgagcagaagaaacacgacgactttgtcgaccgtatgatggaaaaaggctacacccgtaaacaggtgcgtttactgtgcgaatggtatttgcgcgtacgtaaaagctcttaacaaccctggcccggtacacatgttaccgggcctacaacgacagcgaaccgtgggcctgagaagcggcaacacaggcgtagcatacagttggcaaatgtagtacggggggcatatgacctggtttattgaccggcgtctgaacggcaaaaacaaaagcatggtgaatcgccagcgttttttacgccgttataaagcgcaaattaaacagagcatctccgaggccattaataagcgtagcgtgactgacgtcgacagcggcgaatccgtatccattcccacggaagatattagcgaaccgatgtttcatcaggggcgtggcggtctgcgccaccgcgtgcatccgggcaatgaccatttcgtccagaacgaccgaattgaacgtccccagggtggcggcggaggttccggcagtggtcagggccaggccagccaggatggtgaaggtcaggatgaatttgtctttcagattagcaaagatgagtatcttgatctgctctttgaagatttggccttaccgaatctgaaacaaaaccaacaacgccagctgaccgaatataaaacgcatcgggcgggttataccgctaacggcgttccggccaatatcagcgttgtgcgtagtttgcagaacagtctggcgcgacgcacagccatgacggcaggcaagcggcgggaacttcatgcactggaagagaatttggccatcatcagcaacagtgaacctgcgcaactgctggaagaggaacgtctgcgcaaagaaattgcagaattacgtgccaaaattgaacgcgtcccttttattgacaccttcgatttacgttacaagaactacgagaagcggcccgatccctccagccaggcagtgatgttttgcctgatggacgtttccggtagtatggatcaatccactaaagatatggctaagcgtttttatattctgctgtatctgttcctcagcagaacgtataagaacgtggaagtcgtatacatccgccatcatacccaggcgaaagaagtcgatgaacatgagtttttctacagccaggaaacaggcggcaccattgtttccagcgccctgaaactgatggatgaggtagtgaaagagcgttataacccggcacagtggaatatttacgctgcacaagcaagcgacggcgataactgggccgatgactctccgctttgccatgaaatcctggcgaaaaaattattacctgttgttcgttattacagctatatcgaaattacccgtcgtgcacatcagacattgtggcgagaatatgagcatctgcaatctactttcgacaactttgcgatgcagcacatccgcgaccaggatgatatttatccggtgttccgtgaactgtttcataaacaaaatgcaacagctaaaggctaaaactatcagccaggtcattatcgcctggctgatttttagcttactgtaaattatctcatttattacatacattagcttacaatcgctttaaatatgacagcataacctttacataatttagttccagaaaacaatcattcggaaaaatgattcagagtacacgtatttccatggggttattctttaaatattttttaagcttaacgaaaattgatcctggtcaaaactatatatctctgccaagtataaaatccagcactcacattgctctcctttttatggtttctatgggtacacaaaaattaaaagctcaaagcttttttattttcagtttattgctgacgttaattttattttgcattactaccttatataacgaaaacacaaatgtaaaactcatcccacagatgaattacctgatggttgttgtggctttgtttttccttaacgccgtcatttttcttttcatgttaatgaaatatttcactaacaaacaaattttaccaacactcattttaagccttgcatttttaagtggccttatctatttagttgaaaccattgtaattatccataaaccaattaacggcagtacactgatccagacaaagagcaatgatgtttctattttctatattttccgccaactcagttttatttgtttaaccagcctggcgctcttttgttatggaaaagacaacatccttgacaacaataagaaaaaaacgggaatcctgttgctggcgctgatcccttttttagtttttccccttctggcacacaatctgagcagttataacgctgactattctttgtatgtcgtcgattactgtccggacaaccatactgcgacctggggaatcaactatacaaaaatattggtttgtctgtgggcatttttactgttctttattatcatgcgcacacgattagccagcgaactatggccgttaatagcattattatgtctggcaagcctatgctgcaacttacttctactgactctggatgagtataattatactatctggtatatcagtcgcgggattgaagtttccagtaaactgtttgttgtgtcttttctgatttataacatttttcaggagctgcaactctccagcaaactggcagttcatgatgtgctgaccaatatttataatcggcgctactttttcaacagcgtagagagtttattgagccgacctgttgttaaggacttctgtgtcatgctggttgatattaatcagttcaaacgcatcaatgcccaatggggacatcgtgtgggtgataaagtgctggttagtattgtcgatattatccagcaaagcatccgccccgatgatattttagcgcgactggagggtgaggtgtttggcttgctatttaccgaactcaatagtgcccaggcaaaaatcattgcggaacgtatgcgtaaaaatgtcgaactcctgaccggctttagtaacagatatgatgttcctgaacaaatgaccatcagtattggcacggtttttagtacgggtgacacgcgtaatatcagccttgtcatgacggaagcagataaagccttacgcgaagcgaaaagcgaggggggcaacaaagtgattattcatcatatttaagtgcaaaaatattcagagccatgctttttgcgtggcttttgcatacaatttattactattacccctaaatttcccctccccagcggcgcagagatgagtataattagcgcccctgtgccaggccgcaatcgaactttatctggttttctcgtttcactaaccgaaggagatgcgtataaagcttccgatgagcgtttatatgtcaataagcagaacaaaaacagccgttcatgataaccttctgtggttgtttgcttgtaatctcaggagcgtgaaatgactgaaatggctaaaggaagcgtgacgcatcagcggttaatcgctttattaagtcaagaaggtgctgacttccgcgtcgttacccatgaagcggtaggtaaatgtgaagcggtgagtgaaattcgtggcaccgctctaggccagggtgctaaggcactggtatgtaaagtcaaaggcaatggcgtaaatcaacatgttctggcgatcctcgcagccgatcaacaggccgatctgagccaactcgccagccatataggcggattacgcgctagcttggccagcccggcggaagtcgatgaactcacaggctgtgtcttcggcgcgatcccccctttcagcttccatccaaaactcaaactggttgccgaccctctactcttcgaacgatttgatgaaatcgccttcaatgcaggcatgctggataaatccgttattttgaaaaccgcggattatttgcgcattgcgcaaccagaactggtcaatttccgccgcactgcgtaattagccggtccgttcgataagaagaacggacaaaaccagtacaacagcaatggcaaaaaagctactcgtgataatcagtgtctcgacaaacatttgatcgttcatagcatgcccccgggagatagctgttttcacgttattgttagcgtgcacaaatggcagtttgatgacagttcgcctgattttttatgcaaaaaacgtaaagattttctacttccttcctgcagcaagcgtaaagtaagcaggcttattattttttggcaaggaaaccacgatgtttgatgtcactttgctgatcctgctcgggttagctgcgctgggctttatcagtcataacaccactgtcgccgttagtattctggtgttaatcattgtccgcgtcacaccgttaagcaccttttttccgtggattgaaaaacaggggctaagtatcgggataatcattctgacgattggcgttatggcccccatcgccagcgggacgctaccgcccagtaccttgattcacagctttctgaactggaaaagtctggtggcgattgcagtaggcgtgattgtctcctggctgggtgggcgcggcgtgacgttaatgggcagccagccgcaactggtcgccgggctgctggtaggcactgttttaggcgtagcgctgtttcgcggcgtaccggttgggccgcttattgccgcgggtctggttagcctgattgtggggaaacagtaattattgccgcgggtctggtttcgcactttgtggggaaacagtagttaatctcgcaatatatcggcctggcgtttgccccaggcctttcttaaacatagtaataaaggccgttgtactatcataccccagcgtatgagcaactttctgtacagtatcgcctttcactaatccctgaagcgccataatcagctgtaactgctgacgccactggcgaaaactcaaccccgtctcttttactatcagtcgggcaagattgcgttcactcatcgcaaaaaagccagcccattgccccaatgccccccactcgacaggccctttcgccatcatctccaccatcgtgcggattttaggatgagaagaaacgggcaggtgcagctgttgttgtggctgctgagggagttcatcaaacaggacctgaattaatctgcgggtcattggctcagcacgctgagtcgtcgtcctgtttgccagggttaaaattaattcccggcataaggggcttattttcaatgtgcaacatgttgtcggcattgtcactgcgctgggttcgataaacagaaaacagagttcagcattagctgttacttgattgctatgttccaccccgcccggtatccaaaccgcatattgtggcggcaccatccacaaagcattttccaccgtacaggtaattgcaccatgtagcgccagtatcagctgtcctttgcggtgctgatgtacaggactggttaactcatccgttccggcgtgaatacaaaatgcgaccgcggcttcatggtgtcggtcgggttcatagccattgagattcaacctgtgcatcattttgtccgaacttagcgataatttgtcattttagcttgattcaacataacaataaaaacggtaaggtacagcctcgtttgtaacaatgagaagcatatgacctgtagtactagtttaagcggcaaaaacaggattgtccttatcgctggcattctgatgattgccacaacattacgcgtcacctttaccggcgcagcaccgttactggatacgattcgttccgcttacagcctgacgacagcgcaaaccggcttattgaccaccctgccattattggcctttgcgctaatcagtcctttggctgccccggtagcgcgacgttttggtatggaacgtagcctgtttgccgcgttacttttgatctgtgctggtatcgcaattcgctctctccctagcccttacttattatttggcggtacagcggtcattggcggtgggattgcattaggcaatgtcttactgccaggattaattaaacgcgatttccctcattccgtcgccagacttaccggcgcatattccctgacaatgggagctgcagcggcactgggaagcgctatggtcgtgccgctggctttgaacggttttggctggcaaggcgcgttgctcatgctgatgtgttttcctctgctggctctttttttatggctgccacagtggcgaagtcaacaacatgcaaatttgagtaccagccgcgccttacatactcggggtatctggcgtagtccgcttgcctggcaggtcacattgtttcttgggatcaacagtctggtctattacgtgattattggctggcttccggcgatcctcatcagtcacggctatagcgaagcacaggcgggtagtctgcatggtttgctgcaactagccacagcagcacccggtttgctgatcccacttttcttacatcatgtgaaagatcagcgtggtattgcagcgttcgttgccttgatgtgcgcagtgggcgcggttgggctctgctttatgccagcgcacgcgatcacctggactctgcttttcggttttggttccggcgcaacaatgatactggggttgacgttcattggtctgcgggctagttctgcgcatcaggcggcggcactcagcgggatggcacaatccgtcgggtatttgttggcagcctgtgggccgccgctgatgggtaaaatacacgatgctaacggtaactggtctgtaccacttatgggtgttgccatacttagtctactgatggcgattttcggactttgcgccgggagagacaaagaaattcgctaatatccggtgctatagtgacgtaacaaatcatgcgtgaaagggagaacaaacacgatgaatattcagtgcaaacgcgtttatgatccggctgaacagagcgatggttatcgcatactggtcgaccgcctctggccgcgcggtatcaaaaaaaccgatttagcccttgatgagtgggataaagaaatcacgccgagtacggaactgcgcaaagcctttcacggcgaagtcgtcgattatgcaacctttcgcgagcaatatcttgcagaactggcgcaacacgagcaagaaggaaagcggctggcggacatcgccaaaaaacagccgctgaccctgctctacagtgcaaaaaacaccacgcagaaccatgcgctggtgctggccgactggctacgtagcttgtgattttagtacagcatccggcggttatttttcaccagccggatggtcacgccgccacaatgcccattcatcaatcgtttcaccgcccggtaatttgcaattgttgctgaccccttgcgctgtctgcactggaatgagcgtcccgcccttctgctggcaatagacgctcgccggatttgccataccaatctgcggcggtttaggtgcttctggctgagaaggggtactacaaccagccaggaccagcaagcaaggcagaacaaaactgataattttcatttattgatctcacatatttatccaagattagagtatcgcggtatcgttttgttttgcagcactatttttattacattcactcaaaacatattacgtcttgtttcatctttgttgatgatgttttatcatgcctgcaaagattaaataatcagcatttacccgccgtatcctggagttgttccgtgagtgatcagattatcgcccgcgtcagccaatcccttgccaaagaacagagtctggaaagtctggtccgacagcttctggagatgctggaaatggtcactgatatggaaagtacctacctgaccaaagtggatgtcgaagcgcgcctgcagcatattatgtttgcccgtaacagccagaaaatgtacatcccggagaattttaccgtcagctgggattacagcttatgcaaacgcgccattgatgaaaactgctttttcagcgatgaagtccccgaccgttggggtgactgtattgcggcacgcaatcttggcatcaccacatttctgagcacgccaattcacttaccggatggaagtttctatggcacgctttgcgccgccagcagtgagaagcgccagtggagtgaacgcgcggaacaggttttacagttattcgccggactgattgcacaatatattcaaaaagaggcactggttgaacagctgcgcgaagccaatgctgcgctgattgcgcaaagctataccgacagcttaaccgggctaccgaatcggcgggcgatttttgaaaatctgacgacactgttttccctcgcccggcatcttaaccataagataatgatcgcgtttatcgatctggataacttcaaattaatcaatgatcgttttggtcataatagtggcgatctgtttctcattcaggttggcgagcgccttaatacgctccagcaaaatggcgaagttattggtcgtctcggcggtgatgagtttttagttgttagtctaaacaacgagaatgcggatattagcagcctgcgagaacgcattcagcagcaaatacgtggagaatatcacttaggtgatgttgatttgtattatcccggtgccagtcttggcatagtagaagtcgatcctgaaacaaccgatgcagacagtgccctgcatgctgccgatattgcgatgtatcaggagaaaaaacacaaacagaaaacaccttttgtcgcgcatccagcgctacattcctgaggcgtattcacatccttttgattggtgataacatgcgaatcggtattatttttccggttgtaatcttcattacagcggtcgtatttttagcatggttttttattggcggctatgctgccccgggagcataaagatgaaaaaaacaacgattattatgatgggtgtggcgattattgtcgtactcggcactgagctgggatggtggtaacgtcacctctaaaaaatagcaaaggctgcctgtgtgcagcctttgtgcaatttaagcgttaacttttaatcttcctgtagataaatagcacgacaatcgcaccaataacggcaaccacgaagctgccaaaattgaagccatcgactttaccaaagccaaacagcgtgctgatccatccgccgactacggcaccgactatccccagcaggatagtcataaagaatccacctccatctttacctggcatgatccacttcgccagaataccggcaataagcccaaaaataatccaactcagaatgcccattgtttcctcacttatctgttttgcattagcgggttagtcgctgataaaaagcatagcacaacatcgggagggcaagatttgtgacgagcatcacggaggttttttttgcgatggcgcagaaattgcgccatcaacgatcagtgataattaccaaccacaaacatcatgttcgttttccgtgtcataagaacgtacggtattcaccagatcttttatcacttcagccgccacttctggcaccagcaaagtcatcggcgtctctgtttcataatcgacagaaacgccattgctgttattggtgacggtcacggtatacgttgctttgcccatgattcatttcccgttatgaatgactttccgttgttgcgcaccttccatcaggacttcaggagccacgaagaagtcaatgttgaaataagtatcgtcagtcatggcttcaatgttgtgccacttttctggagggaacaccgcaaactgccccgcttcgataaggatcacctgatcaggctctgcactgtgttcatcagcgtagccgagatatttgaccgccccatgcataacggaaaggcgtgggtaaacccccgggcgcgttcctttatcaagatgacgttcgaatattccggcaggtgcagtttgtttattccagaaaggcgtactgcgcgtatgaatataattctgtgggatttgaagcatccttttccctccttcggtgaatgcgctgaaaacggtttattccagccgtttcagggtacgcctgataatttgcattttaaataccatttattggttactttttagcaccatatcagcgaagaatcagggaggattatagatgggaagcccgcgacaacgcgggctgaaagcatcaggattgcagcgtcgccagtcgggcagcgaaacccacgaacatcaaaccaatcagactgttgccaactttagccagtttctttttggtacgtatgtactgcgtgacaaaagcaccagatataatcaggaagctcaaatagcagaaactcaccagttccagcgtcgccgccagaataaagaaactaattcccgtatgtggggcattaacatcgataaactgtacgaaaaagctcacatagaacaaaatggctttcggattagtcaggctcaaaattaacgcgcgtttaaaaatagcaccgtattggggctcatcggatttggcctcgctatttttacccttcagggtcgcgtaaagaattttactccccagatagagcaaataaaacgcaccaagataacgtacaatgttgaataatatcggggtggtcttaattaatgtcgccactccagcccatgccagaaacatcaataccgcatcgccaataaatacaccgcaggccgcaagataaccgcctttcataccgctactgacgctatttttgagtacaaacagggtatttggccctggcaccaacacaataaaaatggccccaaccagataggtccagtaattcagaaccccgtattcagcgaacacattaacctctttaattatctttcgatcatgcgcgattaaaggtgaatatgctaaccaatctgtagcggcttagaaaggagaaaatcaggttttaacctgatatcaacccgataattgaatcattaatcaggcatgctccagactaaaattcgggtagtgctcggcaaaatactggcgtaaaaattctaccgttatccgcactttcgcactcgtcgccagcctactaacataaacggcccagacgttcgctggctggtaatattccggtagcacttgcactaaatgaccactggcaatgttttcgctaacatcccaccaggaacgcagagcaatcccctgcccatcgagacaccactgatggacaatttctccatgattagagctcagtgggccggtgactttaatcgcatgggggccttctttattgcgtaattgccagacaccaaaaggatgatcgcgctctttaatgaccaggcacggcaatgcagaaagatcggttaaatgtttcggcgcgccatgttgcgcaataaattccgggctcgcgcagagaatacggtaattggtcgccagtttgcgggcgattaaattaggggcgatgtcatcgccaatgcgaatatcgagatcgacaccttcattgaccaaatcgaccagtcggtcttccacatcaaaacgtaattccagttgcggatacgccttcgccagcgctaataacgccggagccaccacctgtcgtccaaaaccaaagctgctgataatacgcagcatcccctgcggcacctgacgcacgtcagaaagttcgtccatcatctgaccgacatcctgcaaaatccgctgcgcccattcataaatccgctctccttcttcggtaatggtgacgcggcgggtggtgcggtgtaacaacaccacgtttagcgtttgctccagcaaggcgatgcgcttgctgacgaacgccggactaacgcccagttcttccgccacggcggcaaaaccagcccggcgagccaccagcataaagacgcgcaaatcattcagcagcggtaaattattcatgattcgtgttttatgtttcaccagttacggggattaattccttttcagtcaattataggatggtgatgttgtcaattttgatggtcaggaagtgagaacccaatgatgaaaacgatgcgtattgctgcgatcccgggagacgggattggcaaagaagtccttcctgaagggattcgcgtgttacaggctgccgctgagcgctggggcttcgccttgagttttgagcaaatggagtgggcgagctgcgagtattacagccatcacggtaaaatgatgccggacgactggcatgagcaacttagccgtttcgacgccatctattttggtgccgtcggctggccggataccgttccggaccatattagcttgtggggtagcctgctgaaatttcgtcgtgaattcgaccagtacgtcaacctgcgcccggttcgtctctttcctggcgttccctgcccgctggcgggaaaacagcctggcgacatcgatttttacgtggtcagggaaaacaccgaaggcgaatattccagcctcggcggtagagtgaatgaaggtacagagcatgaagtcgtcattcaggaaagcgtatttacccgccgtggtgtcgatcgcattttgcgttatgccttcgaacttgcgcaaagccgtccacgtaagacactaacttctgccactaaaagcaacggtttagccatcagcatgccgtactgggatgagcgagtggaagcaatggccgagaattacccggagatccgctgggacaagcagcatattgatattctctgcgcgcgttttgtgatgcagccggaacgattcgatgtggtggtggcgtccaatttgtttggcgatatcctttccgatcttggcccggcctgcaccggcaccattggcattgccccatccgccaacctgaatccggaacgcactttcccgagcctcttcgagcctgtccacggttccgcgccggatatctacgggaaaaatattgctaaccctatcgccacgatttgggccggggcaatgatgctcgattttctcggcaatggcgatgagcgtttccagcaagcgcataacggtattctggcagcaattgaagaagtgattgctcacgggccgaaaacacctgatatgaaaggcaatgccaccacgccacaggttgccgacgcgatttgcaaaattattttgcgttaaggtcaaaccagtttatttgaaccgcgtcactgacgcggtttttttattcgttctttgcagtaaataacctgcgtcatttcaccttttattgtttccgtttcgtgttttatggctttccgtattcttaattgtttaatttatgtaacatgcaaattttgttacgcgtacgttaggttccgccgtacaggtattggttttgctggcaatgggactggtgatttatttagccaccagtaaatacggcaatattcgtcttggcgaaggaaaaccggaatacagcacgctctcctggctgtttatgtttatttgtgccggtttaggttcttctacgctttattggggggttgctgaatgggcctattattatcaaacacctggattaaatatcgcaccgcgtagtcaacaggcactcgaatttagcgttccctactctttcttccactggggcatcagcgcctgggcaacttatacgctggccagtttaatcatggcttatcactttcatgtgcggaaaaacaaaggtctgagcctttccggcattattgctgctattaccggcgttcgcccgcaaggcccatggggaaaactggtcgatttgatgttcctgatcgccactgtcggcgcactgaccatttcccttgttgttaccgcagcaacctttacccgtgggctttccgcgctgaccggtttacccgataacttcaccgtgcaggcatttgtgatcctgctttccggcggcattttttgcctaagcagctggattggtatcaacaacggtttgcaacgtctgagcaaaatggttggctggggcgcgttcctgctgccattactggtgctgattgtcggcccaaccgaatttattaccaacagcatcatcaatgccatcggcctgaccacgcaaaacttcctgcaaatgagcttattcaccgatccgcttggcgatggtagttttacccgcaactggaccgttttctactggctgtggtggatcagttacacccctggcgtagcaatgtttgtcacccgcgtttcccgcggtcgtaagattaaagaagttatctggggactgatcctcggcagcaccgtcggttgctggttcttctttggcgtaatggaaagctatgccattcatcagtttatcaatggcgtaatcaacgtcccacaggtgctggaaacactgggcggcgaaacagctgtacagcaagttctgatgagcttgccagccggtaaattgttcctcgccgcatacctgggcgtgatgattattttccttgccagccatatggatgcagtggcctacaccatggcggcgaccagtacgcgtaatctccaggaaggtgacgatcctgaccgtgggctgcgtcttttctggtgcgtggtgatcactctgatcccgctttccatcttgtttaccggtgctagcctggaaacgatgaaaaccaccgtcgtgctcacagcccttcccttcctcgtcattttactggtgaaagtcggcgggtttattcgctggctgaaacaggattacgccgacattccggctcatcaagttgaacattatctcccgcagacaccggttgaagccctggaaaaaacgccagtgctccctgcgggaaccgtattcaaaggcgacaactgagcgccatcatcctaacgataaaggtatccctatgagcaatctgagccctgactttgtactacccgaaaatttttgcgctaacccgcaagaggcgtggaccattcctgcccgtttttataccgatcagaacgcgtttgaacacgaaaaagagaacgtcttcgccaaaagctggatttgcgtcgctcacagcagcgaactggcgaatgccaatgattatgtgacgcgtgagatcattggcgaaagcatcgtgctggtacgcggtcgtgataaggttttgcgcgcgttctataacgtgtgtccgcaccgtggtcatcagttgttgagcggtgaaggaaaagcaaaaaatgtgattacctgcccgtatcacgcatgggcattcaaactcgatggcaacctggcccatgcacgtaactgcgaaaacgtcgccaatttcgatagcgacaaagcgcaactggttccggtgcgtctggaagaatatgccggattcgtcttcatcaacatggaccccaacgccaccagcgtagaagatcaattacccggcctgggcgcgaaagtgctggaagcctgcccggaagtccacgatctgaaactggcggcccgctttaccacccgcacgcctgccaactggaagaacattgtcgataactatctcgagtgctatcactgtggtccggcgcatccaggtttctccgactccgtacaggttgatcgttactggcacaccatgcacggtaactggacgctgcaatacggtttcgccaaaccgtccgaacagagctttaaatttgaagagggtacggatgcggcattccacggtttctggctgtggccgtgcacgatgctgaacgtcaccccgatcaaagggatgatgacggtcatttatgaattcccggtggattctgaaactaccctgcaaaactacgatatttacttcaccaatgaagagttaaccgacgagcaaaaaagcctgattgagtggtatcgcgatgtgttccgtccggaagatttacgtctggttgaaagcgtacagaaagggctgaaaagccgtggctatcgtggtcaggggcgcatcatggccgacagtagcggtagtggcatttccgaacatggtatcgcccatttccataatctgctggcgcaggtgtttaaggactaatgacatcggcggcggtattttccgccgctgggctgatttttgatggagtacagcaatgagtgactatcaaatgtttgaagtacaggtgagccaggttgaaccccttaccgaacaggtgaaacgcttcacgctggtggcaaccgatggcaaaccattacctgcgtttaccggaggaagtcacgtcattgtgcagatgagcgatggtgataaccagtacagcaatgcgtatagtctactgagtagcccgcatgacacctcttgttatcagattgccgttcggctggaggaaaacagccgcggcggttcccgctttttgcatcagcaggtaaaagtgggcgatcggttaacgattagtacgcctaataacctgtttgcgctaattcccagtgccagaaagcatctgtttatcgcgggcggtattggtatcacccctttcctgagccacatggcagagctgcaacacagcgacgtcgactggcagctacattactgcagccgaaatccagaaagttgcgcatttcgtgatgagctagtccagcatccgcaggctgagaaagtccatttgcatcatagtagtaccggaacacgactggaattagcgcgattattggcggatatcgaacctggcacacacgtttatacctgtggccccgaggcgctaattgaagcggtaagaagtgaagctgcgcgtctggacatcgccgccgatacgctgcactttgagcaatttgctatcgaagacaaaaccggcgatgcatttaccctggtgcttgcccgttccggaaaagagtttgtggtgccggaagagatgactattttgcaggttattgaaaataataaagccgcgaaagtggaatgtttatgtcgtgaaggggtatgcggaacctgcgaaacagcaatactggaaggtgaagctgaccatcgggatcaatattttagcgatgaagagcgtgccagccagcaaagtatgttgatctgttgtagccgtgcgaagggtaaacgcctggtgttggatttgtaatttgccgaagccggatgtggcgctgagcgcgcccagtccggcttcggaagattttactgcggatattcctgcaataaattgtgtaatgcttccgccatcagctcaccacgccagccggaaatcagctccggcaaattgttctgcggtttcagtttccagtgccagttcagcagttggttgatttgccgacggcttgccagcaattcggcgctgatcttatgcgtttcgctcacgtcagtaatcaggctcttaatcgctttaaacgctttacgataacccggcatgtccatcaggttaagcatcggctgcggtaaggcatcttccggcaatgtctgcgctttttccaccagcgctagcagcgttttaccgtgaaagcggatttcgctaccggataaacccaggctgtccagttcgcctaaacttcccggcatataacgcgctacgctccacaaatgctcttcacgcacgacaaagttcaccgccagatcgcgctctcgcgccttgcgcagtcgccagtcggctaacagttgcagacaggccagttggcgtgtgcgtaattgccaggcattggtgatatcacgccaggcatcttccggcgcaacgacttcctgacgacgcatttgcatcaggcggcattcatccagcgccgcaggtagccagccggaggcctccgtttctaccataagcttggcggtgatcggtaacagataccagacatccgccgctgcgtattcacactgacgttcggtcagcggtctggccagccagtcggtgcggctttcactcttgtccagcgtaacgccggaatactcttccaccatggaagcgaaaccccaactcatcgggcgtccgcagaaggcagcaaggatttgcgtgtcaatcaagggttgtggtaattcgccaaagacattgaggaacacttccagatcttcactgcctgcatggagaaattttgtgatggacggatcgcgcaggatcgctttcagcggactccagtcggtgatcccgagtggatcgattagcgccagatgctcgccatcgaaaagttgaatcaaccccagctgcgggtaataagtgcgcgtacgaacaaattcagtatccagggctatcgccggaaaggcacggacggcttcacacaaagaagccagcgcatcgtccgtggtaatcatttggtaattcaaattgttttctctttagtgggcgtcaaaaaaaacgccggattaaccggcgtctgacgactgacttaacgctcaggctttattgtccactttgccgcgcgcttcgtcacgtaattctcgtcgcaaaatttttccgacgttagatttcggtaactcatcacgaaactccaccagcttcggtactttgtatcccgtgagctgacggcggcaaaaagtcaccagactctcttcggtaaggcttggatcttttttcactacgaagattttcaccgcttcaccactggagccggaaggtacgccaacagccgcgacttcctgtacgccaggatgctgcatgacgacatcttcaatctcgttgggatagacgttaaaaccggaaaccagaatcatgtcttttttacgatcgacaatgcgcaggaatccttcttcatccattaccgcgatgtcgccggtgtgtaaccagccatttttgatgatttcatcggtagcatcgggacgctgccagtaacccagcatcacctgcggtcctttgacacaaagctcacccggttgacctggtggtacttcattatcatcatcatccaccagtttggcttccgtgctcggcaccggcaaaccgatgctaccactatgataatcaatatcatatgggttaacgctgaccagcggcgcacactcggtaaggccatagccttccagcagatactgtccggtcagtttcacccaacgctctgccaccacttgctgcactggcatcccaccgcctgcggaaagatgcagactggagaaatccagctgctggaactctttattgttcagcaacgcattgaacaaggtgttaacgcccgtgatagcggtaaacggatatttcgctaactcttttaccaaccctggaatatcgcgcgggttagtgataagcaggttctgcccacccagttcgataaacagcaggcagttaatggtcagggcaaaaatgtgatacagcggcagcgccgtcaccaccagctctttgcccggatgcaacagcggaccataggtcgcgttaacctgttccaggttcgccagcatattgcggtgagtcagcatcgcgcctttcgccacaccagtggtgccgccggtgtattgcagaaaagctaaatcttccggcaccagttcgggtttgacgtactgcatccggtagccgttatgcagtgcgctacgaaaactaatggcatctggcagatggtatttcggcaccaaacgcttgatgtatttaacaacgaaattgactaccgtgccttttgccgtagatagctgatcgcccatacgggtcagaattacgtgctgaacggcggttttatcaaccactttttccagtgtgtgagcaaagttagacacgataacaatcgcgcttgcgccgctatcgttaagctgatgctcaagctcacgcggggtatacaacgggttaacgtttacgacgatcatcccggcacgcaaaatgccaaacagcgccaccggatattgcaataaattaggcatcatcaacgcaacgcgatcgcctttcttcagccccaacccttgttgcaaataagcggcaaacgcgcgactgcgttcttccagcttgcggaaggtcattacctcccccatattcacaaacgcaggttgatcggcgtagcgcgcgacgctctgctcaaacatatctaccagagattgataacggtcagggttgatctccgtcggaacgtccgcgggataacggttaagccaaaccttcttcaattcttcacctctaaaatgcgtgttcgtcgtcatcgcaaccccaaatgatatacatgccgttaacataatattaactcatcataccagcttgataattacccaacgaaaaggttgcgaagcgcgtcactatttatttttatctttaccgtaagaatgcagaaacagcggaccagccgctgtttctttttctttaaaaacaagcaattattcagttacaactgtttgtactctcgcggggccgggattataccagccccatccgccgtagccatagggccagccacgaccgccataaaaccatggatcaatcggctgaggcggcataatcacctgctgggttaaatgccaacgtttgtaacccgttacttgcatcaccataaatttatagggcgtattgccgattttgccgtcaaccgcaccagtgattggcccgactaccgtaaccagttgtccacggaaatccaccgggtccagaaaaccgttcacatcggcataaatgcgaccgcgagaaggttctcccagcgtcggtctggctccgctgtccagcggtacggtagcaatttccaggcgagttttcccttgctggttttgtaccgcaaccactttgccaccaaagcgtgcctcctgaccaacgtacagctgcggcgcactcatcacccgaactaaatcttgttgcggcgtgggactgctgcctttaatggcgtccggcacagtgacacaaccgctcagcattagcgcaaacgtacctgccagtatgcctttgataacattcttttgaaccgccatggtgcgactcctttttttctcagggcatactcttaagattcattctttgcccggaagtttcttccatgcgacgttgttacgtaaataaaccggttcggcatgttccaccgccaccgttttaccctcagcaaacatctgacacgcaatcggcagcatatcttcagcagcaggcagtaacacttcgccatcgcgcaaaaccagcccgctctctttaccgagatccggccaagcttgccagcccgtccctaccgtcacccattcgccggaaagctgttgcattcgttcatggacgatttcgggtttgagtacggcttcggtttcttcaccgtgccagataccgttttcatcacgctgatattcggcccagtaaacttcgcccattcgcgcgtcaatggctgccagcacgcgggttgcgccgtttttgcgccacgccccttgcgccatcgtcattagcgtggagacgccaatcatcggtaattccgcgccaagcgccagcccttgcgcgatgccaataccaatgcgcacgccagtaaagctaccggggccgcgcccgtaagccagagcgttaatatcagtcagggaagttccgctggtggtcaggatatcctgcaccatcggtaagattcgttgagtatgttcacgagggcaaagctcaaaatgagcgttgacagtaccgtcgttccacagggcgacagagcaggcctctgtcgcggtatcgatagccagaattcgcatgggtcttcgtgcttagatcaataaaaaggcgcgcatcataccatactccgtaacaaattacctggaggatggtatcgcaaggaaacgaaccgcacgggcaatgtcacgggtgcgtggcgcgggcggcagactggcgagaaacgtcgcgccgtaaggacgcatcaccagccgattgtcacaaatcaccagcacgccacgatcgtcggcgtcgcgaatcagtcgccctaccccctgtttgagagtaatgacggcatctggtagttgcacttcatcgaacgggtcgccaccgcgcaaacgacaatcttccatgcgcgcttttaacagtggatcatccgggctggtaaacggcaatttgtcgataattaccaaactcaatgtatcgccacgcacgtccaccccttcccagaaactgctggttgccacaagaagcgcattaccggcgctgacaaattgctgcaacagttgccctttgctggtttccccctgcaacaatacaggaagcgtcatggtagcgcggaactgctcggccagatcgcgcatcatggcgtggctggtacaaagcataaaacaacgaccgttgttagcttcgatgatcggtcgcagcattgccgctaactggcgagcagaacctggctggttggtttgcggcagattgcgcagcacacagagtaacgcctggcggctgtaatcaaatgggctgggcaacagcaagctctcggcctgttcgatgccaagccggctggtgaaatgatgcagatcgtcgttcacgctcagcgttgcactggtgaagatccagctaccgggtttttgcgccattaactctttgaatttatccgccacgctgagcggcgtgagagccagagtaaaatggcggctagtgcattcgtaccagtagctgtagcccggctgattgatctcttttagccgcttcagccgtgtgcgatacaacgtggcgcgctcaaatgccgcatccagcaaggcggaacgccccagactcagtttcgccacgtcataacaaagttccagggtgtcatcgagcagtaaaaatgcccgctgaatttgcggattagctaacagctcacgcaggttaccgcgataacctggctcaccgagttgcagacgaaaatcctgcgcactctgggcaagacgatcagcgcacttttgtaactgctgggtgtcttttaattcggtgcggtaggcgatggtgatgtcttttgccaggtcgagcagttgtcgactggagagactctgaccaaaatactggctggcaatgtccggtagctggtgggcttcgtcgaagatcatgacgtccgcttccgggatcagttcgccaaatccactctctttaaccaccatatccgccagaaagagatgatggtttaccaccaccacatcggcgtccatcgcttttttacgtgctttgaccacaaagcaatctttatacatcgggcagtcgctgccaagacagttgtcgttggtgctggtgaccagcggccacgcctgactatcttccgccacgctgacgcaggtgctgatatcaccatcgactgtttgattagaccaggagcgcagcaggatcacatcgcttaagatttgtaccggcagatcgccccccgccagcgcctgctgttcgagacgttcgaggcagaggtagttactgcgccctttcagcagcgccacgttgcccgtatatttcaatgccttactgactgttggcaaatcgcggctgtagagctgatcctgcaacgctttactgccggtgctgataatgactttctttttcgcccgcagcgcaggagccaggtaagcgtaggttttgcccgtaccggttcctgcttccaccaccagcggctggcctttttctatcgcctgggtgacggctaccgccatctgtcgctgtggttctcgcggcttaaagcctggtatcgctttcgccagctgaccgtctggtgcaaaatcgtccgtcacactaccccctgttgatttgaacagggattatgtcaggatgagggcgctttcgccagttgaagtggtgacggcgacctcacattgtggcagtctttgcagcacgaaaatggaagtataatgaggacaaaatgatgactatcgttcgtatcgatgctgaagcccgctggtctgatgtagtaatccacaacaacacgctctactacactggtgtaccggaaaacctcgacgccgatgcctttgagcaaaccgccaacacgctggcacagattgacgccgtgctggaaaaacagggcagcaataaaagcagcattctggatgccaccattttcctggccgataaaaacgacttcgcggcgatgaataaagcgtgggatgcttgggttgtcgcgggtcatgcgccggtgcgctgcacggtacaagcgggtttgatgaacccgaagtataaagttgaaattaagattgtggctgcggtgtaagctttatcgaagcaaaataagtcagacgataatttatcgataatactggtcggttttacataaatcgaccagagaataagatattactgttgatgcttctgctaattcattatttatatttataatttcaattttatctataaaactaactatataaataaacataaacatgccgttgtgttcgccctttgattagcaactctggttttctttcttagctgaacaatctggttatagcgtgcggactgaccgttaaatttctccatcttactggataacacaccatgagctgctacctttaaaacacctgaatgtcaacaggttaactcgtgccatatcgttataatccctttgatattagatgcaaattaaggtcatatatagccttatcgataacatggttaattttaaggataagaatatgcctgctgtaatagataaagccctggatttcattggtgccatggatgtaagtgcgccaacaccaagtagcatgaatgaaagcacggcgaagggaatctttaaatatttaaaagaactgggagtacccgcgagtgccgctgatattacggcgcgagctgaccaggaaggctggaaccctgggttcacggaaaaaatggttggatgggcaaaaaaaatggagacaggtgaacgttctgtgattaaaaatcctgaatactttagtacatatatgcaggaagaactaaaagcactggtctgagttaaatttatatcagcataaatgggtcaggacgcttttaatcacatataaaaagcgtcctttttctcacaatcaaatgatcatcggcttctataacgaaatcgatacggattagtgtgttactcgtcttcatcctcaaaacgcgccacgattcgctcgccggagtggttggcacgcagctcttctgccaccagcgcgattgcctggccgctgctcatcccttgtgccatcagttcctggatccgctcgacagctttttgctgctgttcatgggtgagactaggtaaacctgcaaacattgttaactcctgctaaattgttggcgctaattatttcatgctacccggcacatagccagtagagtcaggactgatgaagacgttatctcccgctgtgattactttactctggcgtcaggacgccgctgaattttatttctcccgcttaagccacctgccgtgggcgatgcttttacactccggctatgccgatcatccgtatagccgctttgatattgtggtcgccgagccgatttgcactttaaccactttcggtaaagaaaccgttgttagtgaaagcgaaaaacgcacaacgaccactgatgacccgctacaggtgctccagcaggtgctggatcgcgcagacattcgcccaacgcataacgaagatttgccatttcagggcggcgcactggggttgtttggctacgatctgggccgccgttttgagagtctgccagaaattgcggaacaagatatcgttctgccggatatggcagtgggtatctacgattgggcgctcattgtcgaccaccagcgtcatacagtttctttgctgagtcataatgatgtcaatgcccgtcgggcctggctggaaagccagcaattcagcccgcaggaagatttcacgctcacttccgactggcaatccaatatgacccgcgagcagtacggcgaaaaatttcgccaggtacaggaatatctgcacagcggtgattgctatcaggtgaatctcgcccaacgttttcatgcgacctattctggcgatgaatggcaggcattccttcagcttaatcaggccaaccgcgcgccatttagcgcttttttacgtcttgaacagggtgcaattttaagccttagcccagagcggtttattctttgtgataatagtgaaatccagacccgcccgattaaaggcacgctaccacgcctgcccgatcctcaggaagatagcaaacaagcagtaaaactggcgaacagtgcgaaagatcgtgccgaaaatctgatgattgtcgatttaatgcgtaatgatatcggtcgtgttgccgtagcaggtagcgtaaaagtaccagagctgttcgtggtggaacccttccctgccgtgcatcatctggtcagcaccataacggcgcaactaccagaacagttacacgccagcgatctgctgcgcgcagcttttcctggtggcagtataaccggggctccgaaagtacgggctatggaaattatcgacgaactggaaccgcagcgacgcaatgcctggtgcggcagcattggctatttgagcttttgcggcaacatggataccagtattactatccgcacgctgactgccattaacggacaaattttctgctctgcgggcggtggaattgtcgccgatagccaggaagaagcggaatatcaggaaacttttgataaagttaatcgtatcctgaagcaactggagaagtaagacgtggaataccgtagcctgacgcttgatgattttttaagccgctttcaacttttgcgcccgcaaattaaccgggaaaccctaaatcatcgtcaggctgctgtgttaatccccatcgtccgtcgaccgcaaccggggttgttgctgactcagcgtagcattcatctgcgtaaacacgctggacaagtggcattccctggaggtgcagtcgatgacacggacgcaagtgctatcgccgccgcgctgcgcgaagctgaagaagaggtcgctataccgccttccgccgttgaagttatcggcgtgctgccgcccgtcgatagcgtcactggctaccaggtaaccccagtggtcggcattatcccgcccgatctgccgtatcgcgccagtgaagatgaagtcagcgcggtgtttgaaatgccgctcgcccaggcattacatctgggtcgttatcaccctttagatatctaccgccgtggtgatagtcatcgggtatggctgtcctggtacgaacagtattttgtatggggaatgaccgcaggcataattcgtgagctggcgctgcaaattggtgtgaaaccctgactatacttatctttacatctacaaaacactacttgagacaatcatcgcaatattagttaaatcgcggtttttgattagtttaattcatgtgaatagttaagccagtcgccgcgttccctcttacactatgcgctgttattagttcgttactggaagtccagtcaccttgtcaggagtattatcgtgattagtctattcgacatgtttaaggtggggattggtcccagttcttcccataccgtagggcctatgaaggcaggtaaacagttcgtcgatgatctggtcgaaaaaggcttactggatagcgttactcgcgttgccgtggacgtttatggtagtctgagcctgacgggtaaaggccaccacaccgatatcgccattattatgggtcttgcaggtaacgaacctgccaccgtggatatcgacagtattcccggttttattcgcgacgtagaagagcgcgaacgtctgctgctggcacagggacggcatgaagtggatttcccgcgcgacaacgggatgcgttttcataacggcaacctgccgctgcatgaaaacggtatgcaaatccacgcctataacggcgatgaagtcgtctacagcaaaacttattattccatcggcggcggttttatcgtcgatgaagaacactttggtcaggatgctgccaacgaagtaagcgtgccgtatccgttcaaatctgccaccgaactgctcgcgtactgtaatgaaaccggctatagcctgtctggtctcgctatgcagaacgaactggcgctgcacagcaagaaagagatcgacgagtatttcgcgcatgtctggcaaaccatgcaggcatgtatcgatcgcgggatgaacaccgaaggtgtactgccaggcccgctgcgcgtgccacgtcgtgcgtctgccctgcgccggatgctggtttccagcgataaactgtctaacgatccgatgaatgtcattgactgggtaaacatgtttgcgctggcagttaacgaagaaaacgccgccggtggtcgtgtggtaactgcgccaaccaacggtgcctgcggtatcgttccggcagtgctggcttactatgaccactttattgaaagcgtcagcccggacatctatacccgttactttatggcagcgggcgcgattggtgcattgtataaaatgaacgcctctatttccggtgcggaagttggttgccagggcgaagtgggtgttgcctgtagtatggctgctgcgggtcttgcagaactgctgggcggtagcccggaacaggtttgcgtggcggcggaaattggcatggaacacaaccttggtttaacctgcgacccggttgcagggcaggttcaggtgccgtgcattgagcgtaatgccattgcctctgtgaaggcgattaacgccgcgcggatggctctgcgccgcaccagtgcaccgcgcgtcagcctggataaggtcatcgaaacgatgtacgaaaccggtaaggacatgaacgccaaataccgcgaaaccagtcgcggtggtctggcaatcaaagtccagtgtgactaatacttcttactcgcccatctgcaacggatgggcgaatttatacccgctttctcgtctgctgtaatattccccactacacttccactgttgcgtcaggcgtttgtcgccatacgcttacagggtggcccgcatgcaaaaagcacaacggatcattaaaacctatcgtcgtaatcgaatgattgtttgtacgatttgcgcactcgttacgctcgctagcaccctgagcgtgcgatttattagtcagcgtaacttaaatcaacaacgggtagtacaattcgccaatcacgctgtagaggaattagataaagtactgcttcccctacaggcaggtagcgaagtcttgcttccgctgattggtctgccctgctctgtcgcccatttgccattacgtaaacaggcggcaaaactccaaactgtgcgatccattggcctggtgcaagacggcacactttattgctccagcatttttggttatcgcaatgtgcccgtcgtggacattctggctgaacttcctgcaccgcaaccacttttacgcctgacgatcgaccgtgccctgattaaaggcagtccggttttgattcaatggacgcctgcagcgggcagtagcaatgctggggtcatggagatgattaacatcgacttactgacggcaatgctgcttgagccacaactgccgcaaatcagtagcgccagcctgacggtggacaaacggcatttgctctatggtaatgggctggtagattcccttccgcaacctgaagacaatgaaaactatcaggtttctagccaacgctttccttttaccattaacgttaatggtccgggggctacggcgctggcatggcactatcttccaacacaattaccgctggcggtgctgctaagtttactggtgggctacatcgcctggctggcgaccgcttaccgaatgagcttttcccgcgaaatcaatctgggcctggcgcaacatgagttcgaattgttctgtcagcctttgcttaatgcgcgcagccagcaatgtattggtgtagagattttgctgcgctggaacaatccgcgtcagggctggattagtccggatgtgtttattcctatcgcggaagaacatcatttaattgtgccactgacccgctatgtgatggcagaaaccattcgtcagcgccatgttttcccgatgagtagtcagtttcatgttggcattaacgtcgcacccagccattttcgccgtggtgtgctgataaaagatctcaatcagtactggtttagcgctcacccgattcagcaactgatcctcgaaatcaccgaacgcgatgccttactggatgttgattatcggattgcccgcgagctgcatcgtaaaaacgtcaaactggcgattgatgacttcggcaccggcaacagcagcttttcctggcttgaaacattacgtcctgacgtgctgaaaattgataagagttttaccgcagctataggttctgacgcggttaacagcacggtgaccgatatcatcatcgcgctggggcaaagactgaatattgaactggtggcggagggcgtggaaacgcaagaacaggcgaagtatttgcgccgtcatggcgtgcatattttgcaagggtatttgtacgcacagccgatgccgctacgtgattttcccaaatggctggcgggcagccaaccgccgcccgcccggcataatggacatatcacgcccattatgccgttacgttaacgcttactcatcttcatcgtgcgccggttgctctttaacaatgcgaaccagatcaacacgataatcattggcttcaatgatggtgatatgcagtggccctacatcaatcacatcgcccacacggggaatgtgaccatttgcgctgatcacgaggcccgcgaccgtcgcgatatcatcgtcatcggcaaggtgctcaacatcaagcgcctgctgcaaggcatgcaaatctgtaccgccttttaccagccagccgtcaccatcagtaatgatttccggcgtttcgtcagcgtccgggaattcacccgcaatggcttccagcacatccagcggcgtgaccagaccttgtaccacaccaaactcgttggtcacgataacaaagctcccgcgagcacgacgcagcacgcccaacaggttgatcggatcgagggtttccgggacgataatcgccggagacgcgctagcaatcgccgccacatcaacgccctcttccagcgccaccagcagttctttagcacgtacaataccgatgatttcatccagttcaccgcgacataccgggaacagactgtgcggactagagagcagttgctcgcggatttcatcgaccccgagattagcgtcaacccagcttatttcaccgcgcggcgtcatgatcccgcgcagagaacggctcgccagcgtcagtacgccgttaatcatgtaacgttcttcttcggcaaatgcaccttccgggatcggcatcggcatcgggttatcggcatcgtgctgaacattggcctgacgtttcccgcccatcaaacgcaggatggcatcggcagtacgcgctcgcagcggcaaagtgctctggtggcgaataaagttgcgacgcgcaatctggttaaacacttcgatgatgatgctgaagccaatcgcggcatacaggtaacctttcggaatgtggaaaccgaaaccttctgccaccagactcagaccaatcattaacaggaagctcagacagagcaccaccaccgtggggtgctggttaacgaatcgcgtcagcggtttggatgccagcaacataaccgccatcgcaatcactaccgccgccatcatcaccggcagatggttaaccatccctactgcagtaattaccgcatccaagctgaagacggcgtcaaggatgacaatctgtgtgacgaccacccagaaactggcgtagcctttaccgtggccggaatcatgatcgcggttttccagccgttcatgcagttcggttgttgctttgaacagcaagaatatccccccgaacaacataatcaggtcgcgtccggagaaggagaaatccatgacggtaaatagcggtttggtcagcgtgaccatccaactaatcaggctcagcagccccagacgcataatcagcgccagacttaaccccagcaaacgcgctttatcgcgttgttttggcggcagtttgtcagcaagaatggcgatgaagaccaggttatcgatacccagcacaatttcgagaacaacaagcgtgagtagccccgcccaaatactggggtccattaagaattccatgacaagctcctgcttaaggaatagctattcgacgccagaaataatgcaggcgtaacgacaaaatgcaaacgaaaggtgcggcatagagtgccagaaaggcaggcgttaaaaggcctgatgctgaaatgacgtcggtgacgatccatactgcgggctactgccctatactccatggttgttaaacgggagttaaacatatcagagacgcctctgatttggcaaagatttaccttcctttgcaaacgaatgtgacaaggatattttacctttcgaaatttctgctaatcgaaagttaaattacggatcttcatcacataaaataattttttcgatatctaaaataaatcgcgaaacgcaggggtttttggttgtagcccttatctgaatcgattcgattgtggacgacgattcaaaaatacatctggcacgttgaggtgttaacgataataaaggaggtagcaagtgaccattgctattgttataggcacacatggttgggctgcagagcagttgcttaaaacggcagaaatgctgttaggcgagcaggaaaacgtcggctggatcgatttcgttccaggtgaaaatgccgaaacgctgattgaaaagtacaacgctcagttggcaaaactcgacaccactaaaggcgtgctgtttctcgttgatacatggggaggcagcccgttcaatgctgccagccgcattgtcgtcgacaaagagcattatgaagtcattgcaggcgttaacattccaatgctcgtggaaacgttaatggcccgtgatgatgacccaagctttgatgaactggtggcactggcagtagaaacaggccgtgaaggcgtgaaagcactgaaagccaaaccggttgaaaaagccgcgccagcacccgctgccgcagcaccaaaagcggctccaactccggcaaaaccaatggggccaaacgactacatggttattggccttgcgcgtatcgacgaccgtctgattcacggtcaggtcgccacccgctggaccaaagaaaccaatgtctcccgtattattgttgttagtgatgaagtggctgcggataccgttcgtaagacactgctcacccaggttgcacctccgggcgtaacagcacacgtagttgatgttgccaaaatgattcgcgtctacaacaacccgaaatatgctggcgaacgcgtaatgctgttatttaccaacccaacagatgtagagcgtctcgttgaaggcggcgtgaaaatcacctctgttaacgtcggtggtatggcattccgtcagggtaaaacccaggtgaataacgcggttagcgttgatgaaaaagatatcgaggcgttcaagaaactgaatgcgcgcggtattgagctggaagtccgtaaggtttccaccgatccgaaactgaaaatgatggatctgatcagcaaaatcgataagtaacgtattgtgttgattatcactcagttttcacacttaagtcttacgtaaacaggagaagtacaatggagattaccactcttcaaattgtgctggtatttatcgtagcctgtatcgcaggtatgggaagtatcctcgatgaatttcagtttcaccgtccgctaatcgcgtgtaccctggtgggtatcgttcttggggatatgaaaaccggtattattatcggtggtacgctggaaatgatcgcgctgggctggatgaacatcggtgctgcagttgcgcctgacgccgctctggcttctatcatttctaccattctggttatcgcaggtcatcagagcattggtgcaggtatcgcactggcaatccctctggccgctgcgggccaggtactgaccatcatcgttcgtactattaccgttgctttccagcacgctgcggataaggctgctgataacggcaacctgacagcgatttcctggatccacgtttcttctctgttcctgcaagcaatgcgtgtggctattccggccgtcatcgttgcgctgtctgttggtaccagcgaagtacagaacatgctgaatgcgattccggaagtggtgaccaatggtctgaatatcgccggtggcatgatcgtggtggttggttatgcgatggttatcaacatgatgcgtgctggctacctgatgccgttcttctacctcggcttcgtaaccgcagcattcaccaactttaacctggttgctctgggtgtgattggtactgttatggcagtgctctacatccaacttagcccgaaatacaaccgcgtagccggtgcgcctgctcaggcagctggtaacaacgatctcgataacgaactggactaacaggtgagcgaaatggttgatacaactcaaactaccaccgagaaaaaactcactcaaagtgatattcgtggcgtcttcctgcgttctaacctcttccagggtagttggaacttcgaacgtatgcaggcactgggtttctgcttctctatggtaccggcaattcgtcgcctctaccctgagaacaacgaagctcgtaaacaagctattcgccgtcacctggagttctttaacacccagccgttcgtggctgcgccgattctcggcgtaaccctggcgctggaagaacagcgtgctaatggcgcagagatcgacgacggtgctatcaacggtatcaaagtcggtttgatggggccactggctggtgtaggcgacccgatcttctggggaaccgtacgtccggtatttgcagcactgggtgccggtatcgcgatgagcggcagcctgttaggtccgctgctgttcttcatcctgtttaacctggtgcgtctggcaacccgttactacggcgtagcgtatggttactccaaaggtatcgatatcgttaaagatatgggtggtggcttcctgcaaaaactgacggaaggggcgtctatcctcggcctgtttgtcatgggggcattggttaacaagtggacacatgtcaacatcccgctggttgtctctcgcattactgaccagacgggcaaagaacacgttactactgtccagactattctggaccagttaatgccaggcctggtaccactgctgctgacctttgcttgtatgtggctactgcgcaaaaaagttaacccgctgtggatcatcgttggcttcttcgtcatcggtatcgctggttacgcttgcggcctgctgggactgtaagactgttgtacactaccggggccttttggccccgtttttttatctggaggattaatgacaatcacggacctggtactgattcttttcatcgccgcactcctggccttcgcgatctacgatcagttcatcatgccccgccgtaacggccccaccctgctggcaattcctttgctccggcgtggtcgcatcgatagcgttatcttcgtcggattgattgtcattcttatctataacaacgtcacgaatcatggtgcgttaataacgacatggttattaagcgcactggctctgatgggtttttatatattctggatccgcgttccgaagatcatctttaaacaaaaaggttttttcttcgccaatgtctggattgaatatagccgaatcaaagcgatgaacttgagcgaagatggcgtgttggtgatgcaattagaacagcgtcggctgttaatccgcgttcgaaatatcgacgatctggaaaaaatttataagcttctcgttagtactcaataagttatgaatttagccaaagctatgtttagtgtatttttaataatcagacatagcttaggctatattacctcttcccttatttgttatttattttaacgtttcattgatatataaatccaaatgaaaatcgttatcaataaagcaatgaaataatatattccaacagttgttttatattctcaaaatatgttaaggttgcgccctcatttggggagtagccgatttccagattccggaaatgtacgtgtcaacatactcgttgcaaaacgtggcacgtacggactgaatactttcagtcaggcgagaccatatgcacatcaatcgctatgcctgcatgaacgcgaaaaccatcacggcttgttgttcatgtatgcatgtttgctgggggcgatgatgtgttttatggataccccggtcaggacattgtcatgaatatcactgctactgttcttcttgcgtttggtatgagcatggatgcatttgctgcaagtatcggtaaaggtgccaccctccataaaccgaaattttctgaagcattgcgaaccggccttatttttggtgccgtcgaaaccctgacgccgctgatcggctggggaatgggcatgttagccagccggtttgtccttgaatggaaccactggattgcgtttgtgctgctgatattcctcggcgggcgaatgattattgagggttttcgtggcgcagatgatgaagatgaagagccgcgccgtcgacacggtttctggctactggtaaccaccgcgattgccaccagcctggatgccatggctgtgggtgttggtcttgctttcctgcaggtcaacattatcgcgaccgcattggccattggttgtgcaaccttgattatgagtacattagggatgatggttggtcgctttatcggcagtattattgggaaaaaagcggaaattctcggcgggctggtgctgatcggcatcggcgtccagatcctctggacgcacttccacggttaataagaacgctgccagaggtgaatattaaagtccgtctggcagtcgaacacttcttttgctgccagtgtttgccagacttctggcttcgcacgccaggcaaacggcgtcatctgcaataatgcgacggcttcatcaccgcgaagacgcatcggataacacaactccgcactctgctgtaatgtaaaaccttccagttgttctgcatgaggtgcatgaagatgtacttcattgtaaatcagccccttcagctccatcaaatgtcgcggtcccggcgtggcagtaatgacccagccgccgggcttcactactcgtgctaattcttctgctttacacggcgcgtaaatacgtattatggcgtccatactggtatcggaaaacggcaaacggtggctggaagcgacacaaaaagtgacctgcggatagcgtttcgccgccgcttttatcgctaccttgctaacatccagaccaaacgtggtgatttcgggcaacgcatcggcaaatgcgtgtgtgtaatacccttcaccacagccaatatccagcaccgccgtggccttatcatcaagccgttccctcagttgggcgacaattgcatcacgcagcggctgataatgtccggcatctaagaatgcgcggcgtgcttgcatcatttccgcgctgtcgcccggatcacgagaccgtttatgctgaacgggcagcagattgacatacccttctttcgccatatcaaactgatgtcgctggggacagatatagctgtttttttcacggctaagaggctgatggcaaagtggacaggaaaaagacatgacaactccggcaggatactaaaggccgcaagtgtaacgcgaatcacgcggcgggcaaatatccgaacgccaggagcgaagataaagcatagtaaaaagcctcgcattcgacgaggctttatagcgagattgaagcgtattcacacttcagatcagtggattcgatcagatagctgttacgttaacagctgccggacctttctggccgtcctgaatttcgaactcaacgttctgaccttcagccagagttttgaagccattaccctggatagcggagaagtgtacgaacacatctttgctgccatcagccggagtaatgaagccaaaacctttagactcgttgaaccacttaacctgacctttaatctttgccatttgaaaaattccttagattgttttcttcgcccgcaggcataacatagataaaacactcacattactgcaactggcaccaatataaggctcggcagagaagcggtattcaacgtcaacgtgtttactcaggacttctttactgaaaatgccacacataaacagaactgtacctcgtttaacccgaaatctgttatcacatacaacgttaattatggcaagccatttttaaacatgtctcgatcagacgcacaaatctcgatacgtcttccactttttttgcacacttatgcaacggaatacgcgccgatatatcattgtgcttaaccttgccagttcaggcagatacttaaactggcgtattttctaacatagttcaataagttcagttgttccaggccagtgggagaagttattacatagtgcgtgcaatatcacattttttgctatgcaatgaataaaaagttatatcactttttctcataaaacagtcagttaacggctattaattaccctaaagagaagtcaatccccaaagggattgtaaatttaaaataagaaaaattgatgaatgagcaaaaaaatcaagagagaaacgtttcgctaataaataataccacgcttaatcacaaatccgatgtaaacatcctaataaattaatggggtaaatatctttttctgatatcccgttacgcaaataaataatatgataattatttgaagtcagaccagagttttaatttgaagcagttgcaccatgacagtgcgtataatcaggatgaattgagtaacccttcaacgacggggttactcaagattgaggaaggattatcgttcggcgaccagacgaataatatcttcgtcttcaacgcttttttgactctcaacggtctttttatctgctttctctggttcgtttgcttcgcacaaacgacgtaacagtgcattttgacgtttttgctgatccagcaacgcctcaagcagttcaatctgttcgttagtccgactactggcacgattgataaaaaaccacaagatgagcccgataagaagaaccaccacgcttacaaccaaagacgcaatgttcatcacgccactatttacaacttcgttcatttcaccacctctgagtagaggcgctattctaccactgctggagaggaagaaaatctagtgctgaaaaaatgatatcaccacgggataaactggttaatggcacaaattccgctgaaaaattgtacatcctgatcgcacatcatgttgaatacctgcgcccaaagcagcaagcaagccaacaccacgacaaccagaacgacccatcgaaactttttcactccaatctccgtttcacctaccttatgtcattaaactagcatgcgttagttaaacagcgcctaactatgtcgatattcgtgctttttcggaatgagtcgcttgcttcagcgcatattgccgctacgattaagcgaacataaaaagagaagaggttgtaatgcgattcatcattcgcacagttatgctgatagcactggtatggataggattattactcagcggatatggcgttttgattggaagcaaagagaatgccgcaggattaggtttgcaatgtacctatctgactgccagaggcaccagcacggtacaatacttgcacactaaaagtggttttttggggataacagattgcccgctgttacgcaaaagcaatatcgtggtcgataatggttaagggcaataaataaccagattctcactcctgagtaaaatactcttatagcaagcgcgtttaatataacgccaccttcaactttatttttctcatgctaaataaagaacctgtctgtttgatattccgacaggttcttactctcatcagaacggatagtcgtgataacccatttgggcagaaattttgcgcgctgcggtatgcaacattgcgacatattcctgtaaacgctcttcagagaaacgcaacgtcgggaaggagatgctcaaaccggcaatgaccacgccaaagcgatcaaataccggtaccgcaatgcatcgcagcccttcttcctgctcttcattatcttcgccatacccctgctcgcgcacctggtccagaacgggtaataacgcttctgtactggtgatggtccgctcggtactgcgtttatactccacgccctcaagaatttgcttcacttcatcgcgatcgcgccatgccagcagtaccttaccaatcgcggtgctgtacagcggattacgacgcccaatccgactatacatgcgcaaattgtacatagagtcaattttgtgaatgtaaacaatactgtcttcgtccagtgcgccgaggtggatagtttctttggtcaggcgggagagctcacgcatctggatatctgcgctacgaattaaatcgacgttttgtaacgcgcgagcgcccagttcaaacaatttcagggtcagggaatatttctcgctctccccttcctgcgccacataacctaaggttttcatggtctgtaaaaagcgataaacggtgcttttactcatcatgacgcgctggctcagctcggttatccctatttcgcgctcttcacccagcgcctgcaaaatgccaaaaacttttagcacggaagatacagaatcaggctgtttatccagatctgcgttagccatttatcacctcattgcgagtgttttataaaaatcagaactgttttttattataatttcgcaccagggtggtcgcaatccatcttttgccggttagttacaattctgcgacatccaccgtgaatatcagtgctagaatcatacccctgttgattattcaccaaagatataaaattcctatgccaaaagttcaggccgacggcctgccattgccccagcgatacggtgcgatattaaccattgtgattggtattagcatggccgtccttgacggcgcaatcgccaacgtcgccctgccaacaatcgccacggaccttcatgccacgccagccagttccatctgggtagtgaacgcctatcaaatcgccattgtcatctccctgctcagctttagctttctgggcgatatgtttggctatcgacgtatttataaatgcggtctggtcgtttttctgttgtctagtctgttctgcgccctttctgatagcctgcaaatgctcacccttgcgcgtgtcatacaaggtttcggcggtgcagcgttgatgagcgttaataccgcacttatccgcctgatctatccacaacgttttctgggtagagggatgggcataaacagctttattgttgccgtctcttctgctgccgggccgacaattgctgcagcaatcctctccatcgcatcctggaaatggttatttttaatcaacgtaccgttaggtattatcgccctgcttctggcgatgcgttttctgccacccaatggttctcgcgccagtaaaccccgtttcgacctgcccagcgccgtgatgaacgcgttaaccttcggcctgcttatcactgcgttgagtggtttcgctcaggggcaaagcctgacgttaattgctgcggaactggtggtaatggttgttgttggtattttctttattcgccgccagctttctcttcccgtaccgctgctaccggtggatttactgcgtatcccgctgtttagtctttctatttgcacatctgtttgctctttctgcgcacaaatgctggcaatggtttccctgcccttttacctgcaaaccgtgctcgggcgtagtgaagtcgaaacaggtttacttctgacaccgtggccgttagcaacgatggtgatggctccgctggcaggctatttgattgaacgcgtacatgcaggattgctgggggctttagggttgttcatcatggctgcggggcttttttccctggttctgctgcccgcgagtcctgcggatatcaatattatctggccgatgatcttatgtggtgctggatttggcttattccagagtcccaataaccacaccattattacctccgcgcctcgcgaacgtagcggtggagccagtggcatgttaggaacggctcgtctactgggtcagagtagcggcgcggcgctggtggcgctgatgctaaatcagtttggagataatggtacacacgtcagcctgatggctgcggctattctggcagtgattgctgcctgtgtcagtggtttacgtatcactcagccacgatccagggcataaaaaaagcgcgtcgatcaggacgcgctttttagtatttacttcatattacttcaggtattcacccgtacgcagagcttcaattcgtttatccagcggcgggtgggtcatgaacaactcactgaggcttttgctcttaccgttaatgcagagagccatcatgctggttgcttcttgcggttcatagctggttttcaggcgctgcagcgcggcaatcattttctcgcgaccaaccagttttgcgctaccggcatcagcatggaattcacgatgacggctgaaccacatggtgataatgctcgccagaataccaaacaccagttccagaaccgttgcaaccgcaaagtagatcagcgggttgccgttgctctcttcaccttcatcacgatttccgcccataaaacccgcggcaagctgcgccagaatacgggaaataaagataacgaaggtgttcaccacgccctgaatcagcgtcatggtgaccatatcaccattggcgatgtggctgatttcgtgagcaattaccgcctcggcttcatccgggctcatgttctgcagcaaaccggtgctgacagcaaccagagaggcatcacggcgcgcaccggttgcaaaagcgttgatgtccggcgcatggtagatagccacttgcggcatagcgatccccgcctgacgagcctgggttgctacagtattgaccagccaacgttccctttcgttacgcggttgctcgatcacttccccgccaacagatcgtaatgccatccatttggacatcagaaggctaacgaaggaaccaccaaaaccgaacagcaaggccatgatcatcagcccctgaacgctgctgctctgtatccctgtcaggctcagtaccagcccgaaaacgaccattacggccaggttcgttagcaggaagagcgcgattcgcatcataattttctttttacctcagtttaacaaaacgcaatatgcgatacccacatcgtatgggttacgcgactattttcaagtctggatagtgcgtaagtcaccagaaagacacaactttacattttgtagcatctgatttacggcatcttgtcgctgttaaaaaatcaggcacaatttcttgtgcctgattgatattacttgacgggagcgggttgttccgcgggtctggctttttcaagcttcgccagatcgagtgcgatattcaccgtctcatccagataaggatccggctcctggtaatctttcggtagatcatccagtttcttcaactccggtttaccttcgcgtttaaagcgttcgttcaaacgcgccagacgcgtcgcatcatcttcattattctctttctcacgcacagcgtaattcagagaaacgatattgcgcttgtccttcatagcgttgaagcgcgcgatatccttcatgatgttctggaactcaggatctttcgcgatacgcgcattatgttccttcagcagctccggttcaaaggccgttaaatctccacttttcacataagtcgcggcatcaatgctatcccacggcagcgcgttatcttcgaatttctcacccgtttccgtttcttcattacccgtcggcatgatgatgtctggcgttacgcctttacgttgcgtactgccgccgttaacgcgatagaatttctggatcgtgtactgcacagaacccagcgctggccattcaggacgtaacatctgatcgtaaatacggttcaaactacggtattgctgaacggtgcctttaccaaacgtcggttcacccacaaccagcgcacgaccgtaatcctgcattgccgcggcaaagatttcactagcgctagcactgaagcggtcaaccagcaccaccagcgggcctttatagaaaacctgtccgtcggtatcgctatcttcacgaaccttgccgttgttatcgcggacctgaacaatgggacccgcaggaataaacagaccggagaggcttacggcttcagttaacgccccaccgccattgctacgcaggtcgatgatgacgctgctgacattctgtttttccagtttctgcagttgcactttgacatcgtctgtcaaacccacatagaagcccggaatatccagcacgccgactttctctttaccgacggtcttcacgctcattttaaccgcgcggtcttcgagacgaatacgttcacgggtcaacgttacagtacgggtcttggtccctttaccagcaggtaaaatttccagacgaactttactgcccttcggccctttaattaaggcaaccacatcatcaagacgccagccaatcacgtcaaccatcggcttgcctgtttgaccaacaccgacaattttgtcaccaacgctgatagctttactcttcgctgccggaccacctgccaccatgctattgataacggtgtagtcatcatccatttgcagcactgcgccaataccttccaggctcaaactcatttcagtgttgaactgttcggtattacgcggggaaagatagttggtatgcgggtcgatttcacgcgcaaacgccgtcattgccaggctgaaaacatcttcgctgttggtttgcgccagacgacgaatggcaaatttgtagcggcgagtcagggtttcacgaatttctttatccgtttttcctgtcagcttcaggcttaactcgtcgaatttgactttactgtcccacagcgcgttcaactcagcctcgtttttcggccagggcgctttgctgcggtcaaggttataagtgtcgttgccggtgaaatccatcggcttttccagtacgctcaaagcgtactggtaacgctcaaaacggcgcttttgcgccagattgtagagatcgtagaaaacgtcgagtttgccactacgcagttcatcgcctaactcggttttctttttcgcgaactgttcaacatcgcttgccagcagcacgttgtggctgtaatcgagcagattcaggtagcggtcaaagattttggcgctaaatgcctgatcgaggtcgaactggcgataatgagaacgggtgaagcggctcgttacgcgctcacttaccgtcgcatgctgcgtctcttcctttaataccggaatttgatcagcacgcgtgatatcttctacagcgaaggtctggcctgctattgcaagcaggccagctaacgcggtaagcctaaaaaacatgttcatgcctggcccggcctccgtttcagaacaccaggtgttctgcgcgcacaatcaaagacataccgctattcagctggacgcggacgccgtctttggtgatttctaatacggtggcatccatcgcgttttgacccgctttcaccttcagggcttgtccgacagtcagagcactaatgtcagaaaccggggtgtgctgttcttcgcgaggtgcttttactgtttttggcgctttctctaccggcttttgcgcacgaggtttacgttcagcgccttctttgcggcgtggcgtagtcggacgtggcttgcgttcgcggcgcggtgcgtcttctttctcaccagcagttgcggcagcttcgcgttttttcgcttgctgttcagcacgctgtgcctgaacacgcgctttcgcttcttcaagctgcttgcgagcatgctctacatgttgctcgtccagctcaccgcatgggttgccgtcaagatcgacacgcgttgcgccgggtttaacaccgtaaagataacgccagctgctagtgtagagacgtaaagcggatcgcaattgcgttttgctcaggttcatttccccagcaacacgatcgaccaaatcctgaaaaataccgattttcagcggacgcgcttcaccttccgcactgaaacagtggggaaaacgttcggccagaaacgcgattacttctttactgctattcaacttaggttgattttccatgaaatttcctgattacaacggacgtagccaacaagcgcaggcatgaacaggcgtcattataatgacgctatcagtaaatgctacgttatccgttgattatcctgcgacgctcgcaaagaattttttgtaatccgtcgttgcaagcactttttcaagctgtgccacaagctgacgtaagccttgctcgtcctcgtctgtaaagcgaccgaagacggtactatcgatgtcgagaacaccaataatctgatttttcaccaccagcggcagaacaatttcagaattactcgccgcatcacaggcaatatgcccgtcaaacacatgaacatcctcgatacgctgcacttgattgcgggcaaccgcagtgccgcacacgccgcgcccgacgggtatccggacacaggcaattttgccctgaaatggtccgagtaccagtgtatcgtcctcaagcaaataaaaacctgcccagtttatgtcagtgagacgctcatataacaacgcactggtgttcgcaagcgttgccagaaaactggtttctcccgccatcagcgcgttaaagtcgcgatttaaatccgcgtaaaattctgttttgttcattatataatcacttggttgtcttacctggatctgccagcctattaaaataagcattaaatgcgttaatgctcaagatcattcccatcatgggttaagattaatgttaattcttattacatttggcacgtcatggctcttaacacaccacaaattacgccgacaaaaaagataacagtgagggcaatcggcgaggaactgccgcgtggtgattaccaacgttgcccgcaatgtgacatgctgtttagcctgcccgagataaattctcatcaaagtgcctattgtccgcgctgtcaggcaaaaattcgtgacgggcgcgactggagcctaacgcgcctggcggcaatggccttcaccatgctgttgcttatgccgtttgcctggggcgaaccgctgttgcatatctggctgttaggcattcgtattgacgccaacgttatgcaaggcatctggcaaatgaccaaacagggcgatgcgataacggggagcatggtctttttctgcgttattggtgccccgctcattctggtgacctccatagcttatttatggtttggtaaccgactgggaatgaatttacgtccggtactgctgatgcttgagcgacttaaagagtgggtaatgctcgatatctacctggtcggcattggcgttgcttctataaaggtacaggattatgcccatatccaggctggtgtcggcttgttctcttttgtggcgttggtgattttaacgacggtgacgttgagtcatcttaatgtcgaagaactgtgggagcgattttatccgcagcgccccgctacgcgtagggacgagaaacttcgtgtctgtcttgggtgccattttaccggctatccagatcagcgtggtcgctgcccgcgttgccatatcccgctacgcctgcgtcgccgtcatagtctgcaaaaatgctgggcggcgctgttagcgagtatcgttttattgttacctgccaacctgttgcctatttctatcatttatctgaacggaggacggcaggaagatacaattctttccggaattatgagcctggcaagtagcaacattgcggttgcaggaatcgtgtttatcgccagtattctggtaccgtttactaaagtgatcgtcatgttcactttactgttgagcattcattttaaatgccagcaaggtttacgcacacgcattctgttactgcggatggtgacctggattggtcgctggagcatgctcgacctgtttgtcatatctttaaccatgagcctgattaatcgcgatcagatcctcgcttttactatgggaccggctgcgttttatttcggcgcagcggtaattttgactattcttgctgtggaatggctggacagccgcttactttgggatgcacatgagagtggaaacgcccgcttcgacgactgaataaccgcttactttgggatgcacatgagtcaggaaacgcccgctagcacgactgaagcgcagattaaaaataaacgccgtatcagtcctttctggctgctgccgttcatcgcgctaatgattgccagttggctgatttgggacagttatcaggaccggggtaataccgtcaccatcgactttatgagcgcggatggtattgttccaggccgtacgcctgttcgttatcagggcgttgaagtcggaacagtgcaggatatcagcctcagcgacgatcttcgtaagattgaagtcaaggtcagcatcaagtccgatatgaaagatgcgctgcgcgaagagactcagttctggctggtgacgccaaaagcaagcttggcaggtgtctccgggctggacgccctcgtcggtgggaactatatcggcatgatgccgggtaaaggtaaagagcaggatcactttgtcgcactcgatacccaaccgaaatatcggctggacaatggcgatctgatgatccacctgcaagcccccgatctcggtagcctgaacagcggtagtttggtctatttccgcaagatcccggtgggaaaagtctacgactatgccatcaatcccaacaagcaaggcgtggtgattgatgtcctgatcgagcggcgttttaccgatctggtgaaaaaaggtagccgtttctggaacgtttccggcgttgatgccaacgtcagtatcagtggcgcgaaggtgaaactggaaagcctggcggcactggttaacggtgcgattgccttcgatagtccagaagagagcaaacctgccgaggcggaagatacctttggtctgtatgaagatctggcccacagccagcgtggcgtaataataaaactggaactgccgagtggggccggattaaccgccgacagcacgccgttaatgtatcaggggctggaagtcggacagctgactaaactggatttaaatcctggtggtaaagtcacaggggaaatgaccgttgatcccagcgtcgttaccctgcttcgtgaaaatacccgcatcgaattacgcaacccgaaattatcccttagcgatgctaatctcagcgccctgctgaccggcaaaaccttcgagctggtgcccggcgatggcgagccacgcaaagagttcgttgttgtgccaggcgaaaaagcactgctgcatgaacctgatgttctgacgctgaccctgaccgcgccggaaagttacggtattgatgcgggtcagccgctcattcttcacggcgtgcaggtaggccaggttatcgatcgtaaactcaccagcaaaggcgtcacctttaccgtcgccatcgagcctcagcatcgcgaactggtaaaaggcgatagcaaatttgtcgtcaacagccgtgtcgatgtgaaggtggggctggatggcgttgagtttctcggtgccagcgccagtgaatggatcaatggcgggatacgtattctgccgggcgataaaggtgagatgaaagccagctatccactgtatgccaatttggaaaaagcgctggagaacagccttagcgatttacccaccacaaccgtgagtttgagtgcagagacgctgccggatgtgcaggcaggaagcgtagtgctgtaccgtaaatttgaagttggtgaagtgattaccgtgcgtccgcgagctaacgcgtttgatatcgatctgcatattaagccggagtatcgcaaccttctgaccagcaatagcgtgttctgggcagaaggcggggcgaaagttcagctgaatggtagtggtctgaccgtacaggcatccccgctctccagagcattaaagggagccattagcttcgacaacctcagcggtgccagcgccagtcagcgtaaaggcgataagcgtattctgtatgcttccgaaacagcggcccgtgcggttggcgggcagattacgcttcacgctttcgatgccggaaaactggcggtcgggatgccaattcgctatctcggtattgatatcgggcaaatccagacgctggatctgattaccgcacgcaatgaagtacaggcaaaggcggtactttacccggaatatgtccagacctttgctcgcggtggtacgcgcttcagtgtggtcacaccgcaaattagcgcagctggcgttgagcatcttgatactatcctccagccgtatatcaacgtcgaaccaggccggggcaatcctcgccgcgactttgaattacaagaggccaccattactgatagccgttacctggatggcttaagcattattgttgaagcgccggaagccggtagcttaggcatcggtacgcctgtgctgttccgtggtctggaagtcggtacggttacaggaatgacgctggggacattgagtgatcgcgtgatgattgcgatgcgcatcagtaaacgctatcaacacctggtgcgtaacaattccgtcttctggttggcaagcggttacagtctggactttggtctgacgggcggcgtagtgaaaaccggcacctttaaccagtttatccgtggcggcatcgccttcgccacgcctccgggtacgccactggcaccgaaagcccaggaaggcaaacacttcctgttgcaggaaagtgaaccgaaagagtggcgtgaatggggaactgcgcttcccaaataatgcccactgctccggcgtgcctgcgccggagcgtttatgctaaactgcgcgcctgtttttttgccagtggtacatgctcgtggcccaacacaccgtttatttcccggacgcctttctgacacaaatgcgcgaagcgatgcctagcacgctcagttttgatgattttcttgccgcctgtcagcgcccgttgcgccgcagcattcgcgttaatacgctgaaaatctccgttgctgatttcctgcaattaaccgctccttatggctggacgcttacgccaattccgtggtgtgaagaaggtttctggattgaacgcgacaatgaagatgcattgccattgggtagtaccgccgagcatttaagtggcctgttttatattcaggaagccagtagtatgttgcctgttgccgccttgtttgctgacggtaatgcaccacagcgggtgatggatgtcgctgccgcgcctggctccaaaacgacgcaaatttccgcgcggatgaataacgaaggggcaatccttgccaatgagttttccgccagtcgggtaaaagtgttacatgccaatatcagccgctgtggtatcagtaatgttgcgctcacacattttgatggccgcgtgtttggtgcggcagtgccagaaatgttcgatgccattttgctggacgctccctgctctggcgaaggcgtggtgcgtaaagatcccgatgcgctaaaaaactggagtccagaaagcaatcaggaaatcgcagctacacaacgggagcttatcgacagcgcctttcatgcattacgtcctggtggtacgctggtttacagcacctgtaccttaaaccaggaagaaaacgaagccgtttgcctgtggctgaaagagacttaccccgacgcagtagagtttttaccacttggcgatctcttccctggtgcaaacaaagcgctgaccgaagaaggctttttgcatgttttcccacaaatttacgactgcgaaggcttcttcgttgctcgtctgcgtaaaactcaggcgattcccgccttacccgcccccaaatacaaagtcggtaattttccgttcagcccggtgaaagatcgcgaagctggacaaattcgtcaggcggctacaggtgttggcttaaactgggatgaaaacctgcgcctctggcagcgtgacaaagaactgtggttgttcccggtgggcattgaagccctgatcggtaaagtccgattttctcggttggggattaaacttgccgagacgcacaacaaaggttatcgctggcagcatgaagcggttattgctcttgccagtcccgataatatgaatgcattcgagctgacaccgcaggaagcggaggagtggtatcgcgggcgcgatgtttacccgcaagccgcgccagtggcggatgatgtattggttactttccagcatcaaccgattggtttagccaaacggattggtagccgattgaaaaacagctatccgcgtgaactggtgcgcgatgggaaactttttaccggtaacgcctgacagcgcacaaaaaaagcgcactttttgactggcacattcggctgcctcaactaggctgaaaaatggtgcgatcggactggtcgtaccacaatcggcagctaaatggagagcacgaagatgaaaaccagtgtgcgcataggcgcttttgaaatcgacgacggcgaattacacggtgaaagcccaggtgatcgaacgttaaccattccttgtaaatctgaccccgatttatgtatgcaactggatgcctgggatgctgaaaccagtatccctgccctgctaaatggcgaacactctgtcctttaccgtacccgttacgatcaacaatctgatgcctggattatgcgtcttgcctgatccaaaaagaacccgtcggcatggcgggttatttgtcctggttattcccccgttgtaaaatctctcctaaacttaacggtacggcaccacacttcggggatgaaatgttcgcgctggtactttttgtttgctacctggatggcggttgtgaagatattgttgtggatgtctacaacacggaacagcagtgtctttattctatgagcgatcaacggatccgccagggcggttgttttccgattgaggattttatagatggtttctggcgacctgcacaggagtacggtgatttttaattattgcaattgcacaagagtcagttcgcccccaaagacagcaccggtatcaatataatgcaggttgccaatatccacgcgatgtcgcaacggtgtatgaccaaaccagaaatgatcagcacctgtaattccctgccctttttggcgttcacctaatcggctgcggctccacaagacctgatgcaaatcaacgtccttttgccattcataaacatcatctggataatcggcatgagcaataacatgcttgccggtgcgactgtgtacttcaagaataaagggcaaatgctgacatttttccagcgccgttttcgcttgtttctgttgattatctgccagcgcaataaaccagtcgccgccattcatcaaccacaaagacatctgctgggatgccagcgcatccatcgccatctgttcatgattgcctcttaccgcacaaacccaatgttgttccagtaactgcagacaacgtaaactttgcggcccacgatcgataacgtctcccacactgataagtaaatctcgccacggatcaaaacgacaatgccataatttgcggcgcaactgctcaagacaaccgtgtatatcgccagaaagccagatatgtcgccattgatgacccgcaattctctgataaacgggcgcaggctgtttcatcaatattttcctcccgcgctaaagatcacataatcttaacaagaatgttaaaaaacgctggactcagacagtagagtgtgtgttatggttgactataaagtcagcgaaggaaatgcttctggcttttaacagataaaaagagaccgaacacgattcctgtattcggtccagggaaatggctcttgggagagagccgtgcgctaaaagttggcattaatgcaggcttagttgccttgccctttaagaatagatgacgacgccaggttttccagtttgcgtgcaaaatggtcaataaaaagcgtggtggtcatcagctgaaatgttaaaaaccgcccgttctggtgaaagaactgaggcggtttttttattggaaatcaaaaggctattttaggtaattaacagagtttttcagctcgttctataaacggtgccagactcattttttcgccgggattgttaggatcatcaatctgaatcacgctaatgggttgggcattggtcttcccactggcaacttccttttgtgcgatatcgtttaaaggatactgcacgagggtactcggattaataacatacaaagcattacccggtcggcaagtcagcatcacctcttcgcgattaaacgcccatttgtctttacccacttcaaaacgactgacggtaatcacctgcggtgcagccagcgccgctgcagaactggtgagtaacagaaacgccagaatactttttttcatcattttcgtaatccatcaaaaaggttcgagagtcgcaagcaggctgatgatcaccagcactaccgcacctatcgcccattcgagtttagtcatccacacaaaccagggtgccgcacgatcttcatcctgcctcatgcgcggtacaagaacataacgattagccagcgcaatgaccaccataatcatcaccaggatggctttgagcaataagagttggccccagtaagtcgtaagcgtggggggaaatccggtaatcaacaatgcattaagcacgccgcttgccagtacgccgatcaccgcaaaatgcccgcaccaggaaaaacgcatcagcgcctgaatagcctggtgtcgccaacggcctttgatgagttgcatacaccagagcaccggcagtaatcccccaaaccacgccgccgcacaaatcaggtgaatcgcgtgattagtctgatggattttcgctgttaccccttcattcagcgtcgcatgccccactcccgccagcagaataaattgcgcggtagtgagcataaacagcaaacgtggcatattccgcggttgcataagggcgacgatcaacgttacgagggcgagaacaatttgccataaccagatgccaccaaactgcgtttgcaaaacagcctgccaaatgtttgggctaaatacatctgtccatcccgttcccatcaacccgccctgaacggcgagcattgcagtggcactgatcaaactccagacggcagcgtgctgttgtaaacgcagaaaacgcttcgccagcaagcgacgaatcgtcaagggggccagccaggcaccgtacattgcgaagccaaaaaccagcatcaggctggtgaaatggataaatcgcagcgcgatccaggtaaacgccagcatgatttatttcacgctaaaggtgtagtgtcctttcgttttatgcccgtccacgctaacaacatgccagtcaacggtgtaggttccgggtttcaggctatcggccagtggaacaatcagttgcttttggtcctgctcatttcgcttcgccggtaatgttttaatattttcgttttttggccccgtgatttttgcaccactgaatcctgtttcaacaccttcgctgaagtttaaagtgattgcctgcggtgcagctgtcacttgcgcgtttgccgcaggatactgatgcgttaaatgcgcatgtgcccagacggaaggtgtcaccaagctagtggtcaggattgccagcgcgtagcgaagggagcgtgcagtactagccatattatctattcctttttgtaataacttttttacagagcataaccttgtctaatgtctgagtcgaggatcatcaattccggcttgccatcctggctcactcttagtaacttttgcccgcgaatgatgaggagattaagaatgctgaagaatctggctaaactggatcaaacagaaatggataaagtgaatgtcgatttggcggcggccggggtggcatttaaagaacgctacaatatgccggtgatcgctgaagcggttgaacgtgaacagcctgaacatttgcgcagctggtttcgcgagcggcttattgcccaccgtttggctagcgtcaatctgagtcgtttaccttacgagcccaaacttaaataaaacttatacagagttacactttcttacataacgcctgctaaattatgagtattttctaaaccgcactcataatttgcagtcattttgaaaaggaagtcattatgagcttctggaaagttgcagcagcgcaatatgagcctcgtaaaaccagtctcaccgaacaggtagctcatcatctggagtttgtgagggccgccgccaggcaacaatgtcagctgttagtttttccaagcctttctttactggggtgtgattatagccgacgtgcccttcctgccccacccgatctcagtctgttagacccgctttgttatgccgcaacgacctggcgaatgaccatcattgccggccttcccgttgaatataacgatcgctttattcgtggaattgcggtgttcgcaccgtggcgaaaaacgcctgggatctaccatcagagtcatggtgcatgtctgggccgtcgttccagaaccatcacggtggtcgatgaacaaccgcaaggtatggatatggacccgacctgtagtctgtttactacagggcaatgtctgggagaacccgacctgctggcgagcgcccgtcgcttacaattttttagtcatcagtacagcattgccgtgctgatggcaaatgcccgtggtaacagtgcactatgggatgaatatggtcgtctcatcgttcgcgccgatcgtggtagtttattgttagtcggtcagcgtagtagtcagggttggcaaggcgatatcattccattacgctaagctttttcggcctggagcatgccatgttgcgcattatcgatacagaaacctgcggtttgcagggagggatcgttgagattgcctctgttgatgtcattgacggaaaaatcgtcaaccccatgagccacctggtgcgccccgatcgtcctattagtccacaagcgatggcgattcatcgcatcaccgaagccatggtcgccgataaaccgtggattgaagatgtgatcccacactattacggtagtgaatggtatgtcgcgcataacgccagctttgaccgccgcgtactgcctgagatgcccggtgagtggatttgcactatgaaactggcccgtcgtttgtggcctgggatcaagtacagcaatatggcgttatataaaacacgcaagctcaatgtacagacgccgccgggcctgcatcatcaccgcgcgttgtatgactgttatatcaccgccgcgttgcttatcgatattatgaacacctccggctggacggcagaacagatggccgatatcaccggacgtccgagcttgatgacgaccttcacctttggcaaataccgtggcaaagcggtttccgacgttgccgaacgcgatccgggctatctgcgctggttatttaataacctggacagcatgagcccggagctgcgtttaacactgaaacattatctggaaaatacttaatccgcaggcgtagcgggtaatgttccctgcgccagcgcgaccagaaaagcatattccatcgctacgccttcgtagcttttaaagcgaccagatttaccgccatggccactgtccatgtcggtacagagcaataaaagatggtcatcggttttcagctcgcgcaatttagcgacccattttgccggttcccaatattgcacctgagaatcgtgcaaaccggtcgttaccagtaaatgcggataagcctgtgcggtgacgttgtcatacgggctgtagcttttcatgtactcgtaatattgcggatcctgcgggttaccccactcttcaaactcaccagtggtaagaggaatactttcatcaagcatcgttgttacaacatcaacaaacggtacctgggcgataacgccgtggaataattccgggcgttgattaattgcaacgcccatcaacatgccccccgcactcccgcccatcgcataacaaaggctaggagagccatagcccagttttaacaatgcatcgcaggcatcaagataatcattaaacgtatttttcttcttcagaaattttccgtcttcgtaccattgttgccccagctcaccaccgccgcgaacatggacaatggcgtagacaaagccacgatctaacaaactcaagcggctaaaactgaaatcggcatcaatacttgcgccgtaagaaccatagccatacaccagcaacgggttgtgtcctttgcgaaaatgtttgcgatggtagaccaagctaaccggaacttcgacgccatcacgggcgactatccacaggtgttcactgcggtaattcgccgcataaaaaccaggaacttccgtttgttttaatacacgacgctcaccggtatccatatccagttcaaacaaagtgtctggtgtagtcatggaagaataaccataacgcaatcgcgcggtttcaggttctggattgtaggcaatccaggtcacataggccggatcatcaaaggcaataccaatgacttcccgggtcttgcggttaatttggcgcaaactggttaacccgcgctgacgctcttcaaccaccagccagtcggtaaacagcgtaaacccttccagcatgatgttttcgcgtggcggaattaactcttcccactgttgctcatcacgcatacgggtacggtataagccaaagtttttgccgtggcggttggaacgcagataaaaacgatgctggtagtgatcaaggctgtattcgtgatctttgcggcgcggcagaaaaacaaacggctcggcatcggccatttccgcgtccagcaggcgaacttcactggtggtggcgctggccaaatgaatgactacatagtgcttgctggtcgttttatgcaggctgacgtaataggtatcgtctttttcttcgtagatcagtttatcttggcttgctggcgtaccgatggcgtgacgccagacctgataaggcagcagcgtcaccggatgcttgcgaacatagtagaaaatccaggagtcatttgcccagacaaagctgggttcaacgttatccagcagttccgggtaccagttaccagtttccagattacgaaaacgaatgccgtactggcgtcgggaaagaaaatcttctgccagcgccataatggtgttatcgggcgtaatcgccattccgcccatgctataaaactcactatgagctgcgcgcttattggcatcgagcaatgtttcccactcatcccactcttcactgaatgcgctttgacgctggtagatagcatattcacagcctggttcataaatatgccgatagcggtagccatttttgatgtagggcgcagaaacttctcgttgcggaatgcggtcgatgatttcctttaagatgcgatcctgcaaggcttgttgactggccatcacccgatgaccgtaactattttcttgttgcaggtagtccaggacttctggctgagaacgcgtatcgtcccgcagccagtagtaattatcgatgcgcgtatcgccatgaagcgtcatggcgtggggaatgcgggcggcttttggtagcatgttattgttctttctggttgaaacatcttataagggtggcaaaactcaccggggatgcaagcgaaacaggggagtcattgcttagatgatgacaggtaatggcgcggatatcgaatgttatgcagacagagaaaatcagcctgttcaaatggctgtgcgattctggatagcccgaaatagtcaacttcaggctatccagagagcggaattattccgccaaagtgcgtttttgctgttcgagatcgcgttcaatgccgtcacgaacatcctgggggattttcagcgcgtcacccagtgcattcaggtaactgcgttccataaaatggtcaatatcaatagccgcgcaactcaggaaatagatttccagcgcctcttcttcattgcggaccccggtagccaggcgttgtggatccagcggttgttcgattgcctgctcaatgagtacacgcccctgctcttccacgccggctccacgcaattgctggtcgattgccgcacgttctttggcatcaatatgaccatcacttttagcggcaaagaccagcgcaaggatcaaacgtgctgtacgctcatccagcggcgtactttgcgcgccaaactgcggttcgtcctgatgcgccgcgcgaattttatctttgtatttattccacagcaccgtacccgctaccgctccgccgccaaccagtaacgcgttggtgccatatttcgtaagaagtttacgtgcacttttatttgcgaccagcagcccagccagtccgcctaatgcgcctggcactaacagtttgaccaatccctgatccgcagagctggaggtagaagaactgctttgcccaagcagggattgcagttgatttaaccagttagccatatttgctcctcaataaccatttttagtgcctgtagcatagcggatgaggatgtcagaaaatgtatatcgagacaaaagatgcgcaaataagcggggcggtaggccgttattcaaagaaattcgcgccaggtaaggtatttactgtatatcaggtgataagggtattttaggtgaaagtagtttgtcgttttgagtggcattgtttgatgctgattgcccgatgcgacgctgttgcgtcttctcaggcctacgattgtggtgcgttctggggcggacaaggcactcgcgccgcatccgccaacagtcaatcgaattatcagaagccattaacgccgctgatattccgccattcccgctttgcagtccacgctgacctggtaatgaatatcggcacttttaccacgcacggttagcggtacactccatttatcatctttaccctgaatgtcctgcaaactgacccaagccacgggatcggcctgaccgacaattttttgatcatctgcccaacgcgccacgcgattttgttgataatcacgttttacgctcgcggcaattccggcagcatccagatcttcacactttgggaaagtgacgctcttgctggtttcattattggcagcgaaaacacttgcgcaggcagaaaccaacaacagccctaaaaacgcccctctttttttcatgtttttctccatagcacaatgattcaggagaaagcatggtacaaattgtcaggagcgcaagttgcttcaggccgcgtgactggcatcttcctcttcggattcagcaccgacgacctgtggggacggtaatttgccggttttcagaatggtgctcagcacatctttttgttctgccagccataggctaagggcttcacgttgctcgtcttccatttgcactggagaatttgtcagccaggtgtcaagcagatccgccgtatcaagcattttgtcataagcatcggcttcctttttgctggtaaagctcattttctcttcgccctcacgaatgactacgtatttaacttcaaccgccatttgcagcctctcataataactgtgattttatacagtatatttcttttcggttgagaaatcaacatcagcaataaagacacacgcaaacgttttcgtttatactgcgcgcggaattaatcaggggatattcgttatgacgttattaggcactgcgctgcgtccggcagcaactcgcgtgatgttattaggctccggtgaactgggtaaagaagtggcaatcgagtgtcagcgtctcggcgtagaggtgattgccgtcgatcgctatgccgacgcaccagccatgcatgtcgcgcatcgctcccatgtcattaatatgcttgatggtgatgcattacgccgtgtggttgaactggaaaaaccacattatatcgtgccggagatcgaagctattgccaccgatatgctgatccaacttgaagaggaaggactgaatgttgtcccctgcgctcgcgcaacgaaattaacgatgaatcgcgagggtatccgtcgcctggcggcagaagagctgcagctgcccacttccacttatcgttttgccgatagcgaaagccttttccgcgaggcggttgctgacattggctatccctgcattgtaaaaccggtgatgagctcttccggcaaggggcagacgtttattcgttctgcagagcaacttgctcaggcatggaagtacgctcagcaaggcggtcgcgccggagcgggccgcgtaattgttgaaggcgtcgttaagtttgacttcgaaattaccctgctaaccgtcagcgcggtggatggcgtccatttctgtgcaccagtaggtcatcgccaggaagatggcgactaccgtgaatcctggcaaccacagcaaatgagcccgcttgcccttgaacgtgcgcaggagattgcccgtaaagtggtgctggcactgggcggttatgggttgtttggtgtcgagctatttgtctgtggtgatgaggtgattttcagtgaggtctcccctcgtccacatgataccgggatggtgacgttaatttctcaagatctcagtgagtttgccctgcatgtacgtgccttcctcggacttccggttggcgggatccgtcagtatggtcctgcagcttctgccgttattctgccacaactgaccagtcagaatgtcacgtttgataatgtgcagaatgccgtaggcgcagatttgcagattcgtttatttggtaagccggaaattgatggcagccgtcgtctgggggtggcactggctactgcagagagtgttgttgacgccattgaacgcgcgaagcacgccgccggacaggtaaaagtacagggttaaacccggcaaaaaaacgctacaaaaatgcccgatcctcgatcgggcattttgacttttacagcttagcgccttctacagcttcacgcgccagcttagtaatgcggtcgtaatcgcccgcttccagcgcatctgccggaaccagccaggaaccaccgatgcacagcacgcttttcagcgccaggtagtcacggtagttagccggagaaataccacccgtcgggcagaaacggacctgggagaacggacccgcgatcgcctgcagggctttcacgccgccgttagcttcagccgggaagaatttgaactctttcaaaccgtagtccatacccagcatcagttcggaaacagtgctgatccccggaatcagaggaatagtcccttcggtagcagctttcagcagcggctcggtcagacccgggctaattgcgaactgtgcacccgcttcagtgacttctgccagctgctgtggattcagcaccgtaccggcacccacaatcgcttcaggcacttctttggcgatagcacggatagcgtcaactgcacactcggtacgcagagtcacttccagaacgcgcaccccaccagcaaccaacgcttttgccatcggcaccgcgtgttccagtttttttaccacgataaccggtacaaccgggccggtggtcaggatactttctgcacttgttttccagtttttcatcagagttttctctcgcctgattacaaatttgtcgtcttaaaaagtgatacaggttgcgccctgttcggcaccggacagtttttcacgcaaggcgctgaataattcacgtcctgttcccacgcgactcgcgctcaggtcaggaatgtgcggttcgcgagcagccagttccgcttcgtctaccagcagcgtcagttcgcctgtctgtccattcacacgaatgatgtccccgtcgcgcacttttgccagcagcccgccatcgtaggcttctggtgttacgtggatagcactcggcactttaccactagcgccggagagtcgtccatcggtaactaacgcaattttgaaacaccggtccaataatacaccaagtggcggcatgagtttatgtaattctggcattccgttcgcttttggcccctgatgacggacaacaacgacacaatcgcggtccagcaaacccgcttcaaaggccggcataacgtcatgctggctttcaaaaacaaccgctggcgcttcaatcacctggttctcaaccggcacggcagaggttttcataaccgcacggcccaggttaccgcttaacacttttgtcccaccatgatgagagaaaggttgttcgaaggaagcgatcacattgctgtcgagacttttttccgccccttcccgccagtccagttcaccattattcagccatggttcaagggtataacgagacagaccaaaacctgccaccgtattgacatcttcatgcagcaggcctgctttgagcagttcacgcaccagaaccggtacgccacctgccgcctggaagtggttaatatcggccggaccgttcgggtagagacgtgccatcagcggtacaacatcagaaaggtcagagaagtcatcccagttaatctgaataccggccgcgcgcgccatcgccaccaggtgcatggtgtggttagtggaaccaccggtcgccagcagtgcaacgataccgttcaccaccactttctcatcgatcatcttaccgatcggcatccattcattaccattaccggtcatgcgtgtaacctgacgcgcagctgcggcggtcaaagcatcgcgcagcggagaatccggatgaacaaaagaagagcctggcaactgcatccccataaactccaccaccatctggttggtgttggcagtaccgtagaaagtacatgttcccggcgcatggtaagacgcggcttcactctccagtaaggccatgcggtccactttaccttcggcataaagctggcgaatacgcactttttctttatttggcaaaccgcttgccatcggtccagacggcacaaacaccgcaggcaaatgaccaaagctcagggctgccatcgtcagacccgggacaatcttgtcgcacacaccgaggaacagagcaccatcaaacatgttatgggacagccccaccgccgcagacatcgctatcacttcgcggcttagcaggctcaattccattccatcctgcccctgggtgacaccatcacacatcgccggaacaccgcccgcaacctgaccaaccgcattcgcttcatgcagggctttacgaatgatttctggatagtgttcataaggctggtgcgcggagagcatgtcgttataggaggtgatgatggcgatattgttacgcaacatgcttttcaaagaggctttgtcttctggctggcaggcagcgaaaccgtgtgccaggttaccgcatgccaactggctacgatgaacggtgctagttttcgcttgttctatccgggcgagataagcagagcgagtctcgcggctacgttcaatgattcgatttgttacgcgtaacaattgtggattcataaaggctcctgaaattgagttgtcagagcaggatgattcacaacgcgtttcattcagaggatttatgactgaaacgcctgtaaccggagctcatagggcaaaaacgtttcagtcagtgtaataaaaaaagcctcgtgggtgaatccgcacgaggcctgaaagtgtaaaaattgttctacaatctgcgcaagatcatgttaccggtaaaataaccataaaggataagcgcagatattactcaaactcattccaggaacgaccatcacgggtaatcatcgccacgctggcaacgggtccccaggttccggcctgatacggtttcggcgcatcattgtccatcgcccacgcctcagtaatggagtctacccatttccaggcttcttccacttcgtcgcgacgtacaaacagtgcctgaataccacgcatggtttccagcagcaaacgttcataggcatccgccagatgcgtctgattaaaggtttcactatagctcagatccagcttggtgatttgcaggttatgtttgtggtcaaggccaggaactttattcagtacctggatatccacgccttcatcaggttgcagacggatagtcagtttattctgcggcagatcctgccagctttctttaaacagattcagttcaggtgttttgaaatagaccacgacttcagaacatttggtcggcagacgtttaccagtacgcaggtagaatggcacaccggcccagcgccagttatcaatgtcgacgcggatcgccacgaaagtttctgtattgctgctcttgttcgcgccctcttcttccagatatcccggcacttttttgccctgggcgaagcccgcagtatattgcccgcgtacggttttttcgcgtacgttggagcggtcgatgcggcgcagagacttcagtactttcactttttcatcgcggatgctgtctgcgctcaggtcagacggcggagacatcgcaatcatgcaaagaatttgcagcaggtggttctggatcatgtcgcgcatctgaccggctttatcaaaatagccccagcgcccttcgatccccacttcttctgccacggtaatctcaacatgatcaatggtgcgattgtcccagttattcacaaacagggagttagcaaaacgcagcgccaacaggttcagcaccgtttctttaccaagatagtggtcgatacggtaaacctggcactcctcgaagtattcgccaacctgatcattgatttcctggctggtcgccaggctcgtccccagcggtttctccatgactacgcgtgccggtttagcattcagttttgcctcgccaagccctttgcaaattgcgccaaaagtgctgggcggcatggcaaagtagttaatggtgatacgatttttttgatccagcatcgcgccgagacggctgaatgcagcagtgtcattgacatcgagattacaaaaatccagacgtgcactcagggtgtcccataaaccttcatcaatggtttctttcatgaaagtttcgagcgcctcgcggacaactttggtatatgccgctttatcccagtcagcacgccctacgccgataatccgggtgtccgggttgagctgaccggctttttccagttgatacagggaaggcagcaatttacgacgcgcaaggtcgcctttcgcgccgaaaatgaccaggtcacaggcctgggctgtttgcgttaccgccatgtcattctccttaagttaactaacccggtacttaagccagggtatacttgtaattttcttacggtgcactgtactgcttttacgagcttgcgaaaactgtaaacgcttatccacccgtgcgattacgggaaaagcgcgcaaagtgcggcaaaactgataaaaaaatcatcgttttccattgggtaaaaatctgacactgatcatgttatgaaaaaaaataacaacttttttatctgcttttgtcattaacacggcacacaggcgtaatatctgacaaaactgcatttcgatttctttcagtgcggaaatcgtcattacccgtgagtctctttacatcatgaatatgctggaaaaaatccagtctcagctggaacatttgagcaaaagtgagcgcaaagttgccgaggtcattctggctagccccgataacgcgatccatagcagtattgctgctatggcactggaagccaatgttagcgaaccgacggtgaatcgtttctgtcgcagcatggacacgcgcggttttcctgattttaaacttcatctggcacagagtctggcgaatggcactccctatgttaatcgcaatgtcaatgaagatgacagcgttgaaagttacacagggaaaatatttgagtccgcaatggcaacgcttgatcatgtccgtcatagtctggataaatctgccatcaaccgcgccgtcgacttgctcactcaggcaaaaaaaatcgcctttttcggattaggctctagtgccgccgttgcccacgatgcgatgaataagttctttcgttttaatgttccggtggtgtactccgatgatatcgtgctgcaacgcatgagttgtatgaattgtagcgacggagacgtggtggtgctgatttctcacactggaagaacaaaaaatctggtcgagctggcgcagctggcacgcgaaaacgacgccatggtgattgccctcacctctgcgggtaccccgctcgcccgggaagcaacgctggcaattaccctcgacgtaccggaagatactgacatttatatgcccatggtttctcgacttgcacagctgaccgtgatagatgtgctggcgacaggatttactttgcgacgcggtgcaaaattcagagataacttgaagcgggtcaaagaagcgctgaaggaaagccgttttgataagcagttacttaatttaagtgacgatcgctaaaaacgactgtcactgtcctaatcttatacgacatccgaatgagattaatttatcgccatcgcggcgttatttcattcggatttcatgttcaagcaacacctggttgtttcagtcaacggagtattacatgtccagaaggcttcgcagaacaaaaatcgttaccacgttaggcccagcaacagatcgcgataataatcttgaaaaagttatcgcggcgggtgccaacgttgtacgtatgaacttttctcacggcagccctgaagatcacaaaatgcgcgcggataaagttcgtgagattgccgcaaaactggggcgtcatgtggctattctgggtgacctccaggggcccaaaatccgtgtatccacctttaaagaaggcaaagttttcctcaatattggggataaattcctgctcgacgccaacctgggtaaaggtgaaggcgacaaagaaaaagtcggtatcgactacaaaggcctgcctgctgacgtcgtgcctggtgacatcctgctgctggacgatggtcgcgtccagttaaaagtactggaagttcagggcatgaaagtgttcaccgaagtcaccgtcggtggtcccctctccaacaataaaggtatcaacaaacttggcggcggtttgagcgctgaagcgctgaccgaaaaagacaaagcagacattaagactgcggcgttgattggcgtagattacctggctgtctccttcccacgctgtggcgaagatctgaactatgcccgtcgcctggcacgcgatgcaggatgtgatgcgaaaattgttgccaaggttgaacgtgcggaagccgtttgcagccaggatgcaatggatgacatcatcctcgcctctgacgtggtaatggttgcacgtggcgacctcggtgtggaaattggcgacccggaactggtcggcattcagaaagcgttgatccgtcgtgcgcgtcagctaaaccgagcggtaatcacggcgacccagatgatggagagtatgattactaacccgatgccgacgcgtgcagaagtcatggacgtagcaaacgccgttctggatggtactgacgctgtgatgctgtctgcagaaactgccgctgggcagtatccgagtgaaaccgttgcagccatggcgcgcgtttgcctgggtgcggaaaaaatcccgagcatcaacgtttctaaacaccgtctggacgttcagttcgacaatgtggaagaagctattgccatgagtgcaatgtacgcagctaaccacctgaaaggcgttacggcgatcatcaccatgaccgaaagcggtcgtaccgcgctgatgacctcccgtatcagctctggtctgccaattttcgccatgagccgccatgaacgtacgctgaacctgactgctctctatcgtggcgttacgccggtgcactttgatagcgctaatgacggcgtagcagctgccagcgaagcggttaatctgctgcgcgataaaggttacttgatgtctggtgacctggtgattgtcacccagggcgacgtgatgagtaccgtgggttctactaataccacgcgtattttaacggtagagtaagtacgttgccggatgcggcgaaaacgccacatccggcctacagttcaatgatagttcaacagatttcgaatattctgaagcaaacttgaacttatcatcaggcgaaggcctctcctcgcgagaggcttttttatttgatgggataaagatctttgcgcttatacggctggatttcgcccggtttgcgagttttcagcaattttagtatccaggtgtattgttctggtcgcggaccaacaaaaatctcgacttcttcattcatccgccgcgcaatcgtatgatcatccgcctctaacagatcatccatcggtgggcgcacctgaatcgtcagacgatgcgtcttgccatcataaatcggaaacagcggtacaacgcgcgcacggcacactttcatcaaacgaccaatcgcgggcaacgtcgctttataggtggcaaagaaatccacaaattcgctgtgctctgggccatgatcctgatcgggtaaataatatccccagtacccctgacgtacgctctggatgaatggtttaataccgtcatttctcgcatgcagacgaccgccaaagcgacgacgcaccgtgttccagacataatcaaaaaccgggttgccctgattatggaacatcgctgccattttctgcccttggctggccatcagcatggcaggaatatcgacggcccaaccgtgcggcaccagaaagataactttctcgttattacgccgcatctcttcgatgatctccagcccttgccagtcaacgcgcggctgaattttctccggcccgcgtattgccaactcagccatcattgccatcgcttgcggcgcggtggcaaacatctcatcaacaatcgcttcgcgttcagcttcactacgttctggaaagcagaggctcagattgattaacgcacgacggcgactgctttttcccagtcgtccggcaaaacgtcccagccgtgccagaatgggatcacggaactttggcggcgttaaagcgatacccgccatcgctgctacgcccagccatgctccccagtagcgcgggtggcgaaaggatttatcaaactcaggaatgtattcgctattattttttttcgtttccatgcttttccagtttcggataaggcaaaaatcaatctggtgatagtgtagcggcgcaacttgccccgcaccaaataaaaaaagccggtactgactgcgtaccggctgcgaatggatgttaattaatcaaaccgtagctgcggcacaatctctttggcctgcgccaggaattcgcgacgatcggagccggtcagcccttcggtacgcggcagttttgccgtcagcgggtttacggcctgctggtttatccatacttcatagtgcagatgcggcccggtactacgtccggtattaccggaaagcgcgatacggtcgccacgtttcaccttctgtcccggtttcaccagaatcttgcgcaagtgcatataacgcgtggtgtagctgcgaccatgacgaatagccacataataacctgctgcgccactgcgtttggcaaccaccacttcaccgtcacccacactaagcactggcgtaccctgcggcatggcgaaatcaacacctctgtgtggtgcaacgcgaccggtcaccggattagtacgacgcgggttaaaattagagctgatacggaactgtttcgccgtcgggaatcgcaagaatcctttcgccagaccagtaccgttacgatcgtagaatttgccatcttcagcgcggatagcgtaataatctttaccttcactacgcaaacgtacgcccagcagctggctttgctcacgtttaccatcaagcatttctcgagacattaacaccgcaaattcatcgccttttttcagtttgcggaaatccatttgccactgcatggctttaatcactgcgctcacttcggcgctggttaaaccggcgtttctggcgctggcaacaaagcttcccccgacggtacctttcagcagattgttaacccactctccttgctgcatttcgctggtcattttaaaaccgttagcggcagtacggtcataggttcgggtttcacgacgagacacttcccaggtgaggcgctgcagttcgccgtccgcggttaatgtccaggagagttgttgaccgattttcaggttacgcaattctttgtcggccgcagccagttgggtgatatcacccatatcaataccatactgattgagaatgctgcttagcgtatcgccagtggaaacaacatattcatgcacgcccgcttcaccggcgattttgtcatccagttcgtcctggggaatggcttcatcttcttgtgcagcttgatcaatcggctcactggcttcaggtaagaggctacgaatttcgttctgttccagctcaatggttttgacaattggcgtggcatcacggtgataaacataaggccgccagacagcgacggccagagtaagaacggtgaggctccccaacataacgcggtgtggtcgcggtaaattattaaacgccagggcgacagagcgggctatctgttgcacgtaatcacttcctcattaatctcctttcaggcagctcgcatactggttggctaattgactcaggaattcactatagcttgttttacccagtttgatattcgtccccaggggatccaacgttcccatacgaacggatgtccctcgtgcgacgctctcaacgaccgctggcctgaactgtggctcagcaaaaacgcaggttgctttttgctcaaccaactgtgttcttatttcatgtaaacgctgcgcgccaggttgaatctcagggttaacggtaaaatgaccaagcggtgtcagtccaaactgtttttcgaaatagccgtaagcatcgtgaaaaacgaaataacctttccccttgagcggcgcgagctcgttaccaacctgcgtttcggtactggctaattgtgcctcaaaatccttcaggttggcgtcaagtttggctcgactttgcggcataagttccactaattttccatggattgcaaccgctgtagcccgcgctatctctggggaaagccaaagatgcatgttgaaatcgccgtgatggtgatcttcgtcacttttttccgcgtggtcgtgatcatcatcatcgccgtgaatacttttcatcagtagcggtttcacatcttcaagctgcgcaatcgttacctgcttcgctcctggtaatttgcttaccggtttttgcataaacgcttccatctccgggccaacccaaacgactaagtccgcgttctgtaagcgttttacatcgcttgggcgcagactataatcatgttcactagcgccgtcaggaagtaaaacctctgtttctgttaccccatcagcaatggcagaagcgatgaacccaacgggtttaaggctagcgacaacggcggcatctgcggcctgtgttgcacctccccagagagcggcggataatgctgcgaaaagaagcgtttttttatgtaacataatgcgaccaataatcgtaatgaatatgagaagtgtgatattataacatttcatgactactgcaagactaaaattaacatgacaagtctggtttccctggaaaatgtcagcgtttcttttggccaacgccgcgtcctctctgatgtgagcctggaacttaaacctggaaaaattttgactttacttgggccaaatggcgcaggtaagagcacactggtacgggtagtgctcgggctggtaacacccgatgaaggggttatcaagcgcaacggaaaactgcgcatcggctatgtaccgcagaagctgtatctcgacaccacgttgccactgaccgtaaaccgttttttacgcttacgccctggtacacataaagaagatattttgcctgcactgaaacgtgtccaggccgggcacctgattaacgcaccgatgcaaaagctctctggtggcgaaacgcagcgtgtactattagcgcgagcattgttaaatcgcccgcaattattagtgctggatgaacccactcaaggcgtggatgtaaatggccaggtggcgttatatgaccttattgaccaactgcgtcgtgaactggattgtggcgttttaatggtttctcacgatctgcatctggtgatggcaaaaaccgatgaagtgctgtgcctgaatcaccacatttgttgttccggcacaccggaagttgtttccctgcatccggagtttattagtatgtttggtcctcgtggtgctgaacaactgggtatctatcgccatcatcataaccatcgtcacgatttacagggacgaattgttttgcgtcggggaaatgatcgcagttgatttaacgtcggggaaatgatcgctcatgattgaattattatttcccggttggttagccgggatcatgctcgcctgtgccgcgggtccgctgggtagctttgtagtctggcgtcgtatgtcttatttcggtgatacgctggctcatgccagtttacttggcgtcgcgtttggtttgttgctggacgtgaatccattctatgcggtgattgccgttacgctgctgctggcgggcggtctggtatggctggagaagcgtccacagctggcgatcgacacgttattagggattatggcgcacagtgccctgagcctgggcctggtggtcgtgagtctgatgtctaatattcgtgttgatttgatggcttacctgttcggtgatttgctggcagtgacgccagaagatctcatctctattgcgattggcgtggtcatcgtggtggctattttgttctggcaatggcgcaatttgctgagtatgacgataagcccggatctggcgtttgttgatggtgtgaaattacagcgagtgaaattgttgttgatgctggtgacggcattgacgattggtgtagcgatgaaatttgtcggtgcgttgattattactagcttgctgattattcctgctgctactgcgcgtcgctttgcccgcacgccggaacagatggctggtgtcgctgttttggtggggatggtggcagtgactggcggtttaaccttttccgcggtttacgatacgccggcgggtccgagcgtggtgctatgtgcggcactgttatttattctcagtatgatgaaaaagcaggccagctaatctatcgctgaacacatttgtcggatgcggcgcgagcgccttatccgacctacggttcggtatctctggtagtcctggtaagacgcgaacagcgtcgcatcaggcatattgccagtgccggatgcggcgcgagcgaccaatccgacttacggcatttctggcggcgttatgccaaagtgattccacgcccgcgtcgtcgccatacgcccacgcggtgtacgctgcaaaaagccttgctgaatcaaataaggttccagcacatcctcaatggtttcacgttcttcgccaatggctgccgccaggttatccagacctacaggtccaccaaagaacttatcgattaccgccagcaacaatttgcggtccatataatcgaaaccttcagcatcgacattcaacatatccagcgcctgagcagcgatatctgcgctgatggtgccatcgtgcttcacttcggcgaaatcacgcactcgacgcagcagacggttggcaatgcgcggcgtaccgcgagcgcgacgagcaacttccagcgcgccgtcatcactcatctcaagccccataaagcgtgcgctgcgactgacgatatattgcagatccggcacctgataaaactccagacgttgcacaataccaaaacggtcgcgcaacggacttgtcaggctacctgcgcgcgtggttgcaccaatcagggtaaacggcggcaaatcaattttaatggagcgtgccgccggaccttcaccaatcatgatatccagttggtagtcttccattgccgggtacagcacttcttcaacaactgggcttagacggtggatctcatcaataaacagcacgtcatgcggttcaaggttagtgagcatcgcagccaaatcgcccgccttttccagcaccggaccagaagtcgtgcgtaaattaacgcccatttcattggcgacaatgttggcaagcgtagttttacccaaccccggaggaccaaaaatcaacaaatgatcgagggcatcgccgcgcagtttcgctgctttgatgaaaatctccatctgactacgaacctgcggctgaccaacatactcttccagtaatttggggcgaatggcgcgatctgctacatcttccggcaaagtggtaccggcagaaatcagacggtctgcttcaatcatcctttacctcataacgcggcgcgtagggcttcgcgaattaaagtttcactgctggcgtcagggcgagcgattttgctcaccatgcggcttgcttcttgtggtttatagcccagcgccaccagcgcggcaaccgcttcttgttcagcatcgtcggtcgccgggctggcaggagacgtgagtaccaggtcggcggctggcgtaaagagatcgccatgcaaacctttaaatcggtctttcatttcaacaatcaagcgttcggcggtttttttgccaatacccggcagtttcaccagtgcccccacttcttcacgctcaacggcattaacgaactgctgcgcactcattccggagaggatcgccagcgccaacttcgggccgacgccgttggttttgatcaactctttgaacaatgtgcgctcttgtttattgttaaaaccgtacagcagttgcgcgtcttcacgcaccacaaagtgggtgaaaacgatcgcttcctgacccgcttcagggagttcataaaaacaggtcatcggcatatgcacttcatagcctacgccgcccacttcaattaacaccagcgggggttgtttttcaatgatgatgcctctgagtctgcctatcacatgacgctcctgcgtaatgaatcaaagataatgctgtatgataaaaaaatgctggatagatatccagcgaaggatgaagaaaacttgcgaggtgtctcgatgaactgaaaaatggcacagtataatttattctacaggttatattggaagcaaatattttaatattacatattcagtgaagaaatgcgtaataaaaatatacattgcgcctcctgaaaaaataaattttttatgctattacgtatatttgtatctatttcaatggaatgacaacgtgaatattaattaccctgctgaatatgaaattggagatatcgtctttacatgtataggtgctgccttatttggtcaaataagtgctgcaagtaattgctggagtaatcacgtcgggatcattatcggtcataacggtgaagacttcctggttgcagaaagccgggttccccttagtaccatcaccacgctatctcgttttattaaacgtagctctaatcaacgctatgctataaagcgattagacgctgggctgacagaacgacaaaaacaacgaattgttgaacaggttccctcccggctacgcaaactttaccacaccggttttaaatacgaatctagccgccagttctgtagtaaatttgtttttgatatttataaagaagcgctatgtattccggtgggtgaaatagagacgtttggagaattgttaaatagcaatccgaatgcaaaactcactttctggaaattctggttcctgggttctattccgtgggagcgtaaaaccgtcacgccagccagtttgtggcatcatccgggtttggtgttgattcatgcggagggagtggaaacgcctcagccggaactgaccgaggcggtataacttaacgcagtcgccctctcgccaggttcagccggctttcgctcatctgcatcgcattctgactaacgtggcagtgggtgatagcaatcgccagcgcatcggcggcatccgcctgtggattagcgggcagtttcagcaaggtgcggaccatatgctgcacctggcttttttcggcactgccaatacctaccaccgtttgctttacctgacgtgccgcgtattcaaatactggcaactcctgattcaccgccgccacaatcgccacgccgcgcgcctggcccagtttcagggcactgtcagcgttctttgccataaagacttgttcaatggcgaaataatcaggctggaactgggtgatgatttccgtcacgcccgcatagatgagtttcagacgagacggtaaatcatccactttggtgcggatgcatccgctacccaggtaggacagttgcctacctacctggcggatgacgccgtagccggtcacgcggctacccggatcaatgccgagaataatagccatcacgcgtctccgttttgctgtttagcaggcctcatcagagagtcgctgcgacctcatcagagatttcaccgttatggtaaacttcctgcacgtcgtcgcaatcttccagcatatcgatcagacgcatcagtttcggtgcggtttctgcatccatatcagctttggtagacgggatcatggaaacttccgcgctgtctgctttcagacctgccgcttccagagcgtcgcgcactttacccatttcttcccatgcagtgtagacatcaatcgcgccgtcatcataggtcacaacgtcttcagcacctgcttccagtgctgcttccatgatggtgtcttcatcgcctttctcgaaggagatcacgccttttttgctgaacagataggcaacggaaccatcagtaccgaggttaccgccacatttgctaaatgcatgacgcacttcagcaacggtacggttgcggttgtcagacagacattcaatcatgattgccgtgccgccaggaccgtaaccttcgtagatgatggtttccatgtttgcatcatcatcaccgcccacaccacgtgcaattgcgcggttcagtgtgtcacgggtcatgttgttagacagtgctttatccaccgccgcacgcagacgcgggttagcgtccggatcgccaccgcccagcttagccgcggttaccagctcacgaatgattttagtgaagattttaccgcgcttagcatcctgcgcagctttacgatgtctggtgttggcccatttactatgacctgccataaaaatatctccagatagccctgcctgttcaggcagcgttaattacaaactgttcaatcgcctgccggttgctccaggacttagtgagcgccgccgcagcaggcgcatcaagccacttgtaagccagatgttcagtgaaaacgatctgccgctcgtgcggaagcgcaagacagaaccaactttccgtattacgcgtcacgcccggcgcatagcgatgacgtaaatgactaaaaatttcaaactctaccgtgcgctgacagtcaattaaggtcagttgttcagcgacaacatcaatggtgacctcttcctttacttcgcgcatggcagcttgcggcgcggtttcaccctcttccacgctgccggttacgctctgccagaaatcgggatcgtcacgccgctgcaacatcagcacccgtttcgtatcttgtgcgtagatgaccactaagatgctaacgggacgcttatacactttatccttcacgctgcctcttcgttgactgccttcgctcatcccattcacatagttatctatgctcatgggagttcactcagttgccgcctcgatgcaacgcgaatgatttcgtgtatttgagtcatatcagttattctcagccttcttcacaacctgaatgctcagctcagccagtgcagtcgggttagcaaagctcggtgcttcagtcatcagacacgctgccgccgtggttttcgggaaggcgataacgtcacggatattgtcggtgccggtcagcagcatggtcagacggtcaagaccgaatgccagacctgcgtgcggcggagtaccgtatttcagagcgtcgagcaggaagccgaatttctcgcgctgttcctcttcgttgatacccagaataccaaacaccgtctgctgcatatcaccattatggatacgtacactaccaccgcccacttcgtaaccattgatgaccatatcgtaagcgttcgccaccgcattttccggtgcagctttcagttctgcagccgtcatatctttcggactggtgaacggatggtgcattgccgtcaggccgccttcaccgtcgtcttcaaacatcgggaagtcgataacccacagcggtgcccatttgctttcgtcggtcagaccaaggtctttacccactttcaggcgcagtgcacccatcgcgtcggcaacaattttcttgttgtcggcaccgaagaaaatcatatcgccatcttgcgcggcagtacgatccaggatgtcttcgatgatttctgcattaaggaacttcgctaccgggctgttgataccttccagacctttcgcgcgttcgttaactttgatgtaagccagacctttcgcgccgtagattttaacgaagttaccgtattcgtcgatctgcttacgggtcaggcttgcgccgcccggaacgcgcagagccgctacgcgacctttcggatcgttcgccggacctgcaaatacagcaaactcaacagatttcagcagatcagcaacgtcagtcagttccatcgggttacgcagatccggtttatcagaaccataacggcgttctgcttccgcaaaggtcattaccgggaaatcgcccagatccacacccttcacttccagccacagatgacgcaccagcgcttccatcacttcacgcacttgcggcgcggtcatgaaagaagtttccacatcgatctgagtaaattcaggctgacggtcagcacgcaggtcttcgtcacggaagcatttaacgatctgatagtaacggtcaaaaccggacatcatcagcagctgtttgaacaactgcggggattgcggcagtgcgtagaatttacctttgtgcacacgagaaggcaccaggtagtcacgcgcgccttccggcgtggctttggtcagcatcggagtttcgatgtcgaggaagccgtggtcatccataaaacggcgcaccaggctggtgattttagcgcgggttttcaggcgctgagccatttccggacgacgcaggtcgaggtagcggtatttcagacgcgcttcttcggtgttgacgtggttagagtcaagcggcagaacatctgcgcggttgatgatagtcaggctggacgccagcacttcgatttcgccggtcgccatatcgcggttaatatttttttcgtcacgcgcacgtacggtgcccgtgacctgaatgcagaactcattacgcagttcagaggccagctttaacgcgtccgcacgatccggatcgaaaaatacctgcacgataccttcgcggtcgcgcatatcgatgaagatcaggctaccaagatcacgacgacggttgacccaaccacacagagtcacctgctgccccacgtgggacaaacggagctgtccacaatattctgtacgcatgagatatcccttaacttagctgccggcggatgccccctgctgcgcaggtgaccaagtcgcagcgttagctgtatgtcacaactgaatgaaaaaaggcggctattatactggaaattctgccgcaccgtaagagcctggcccgcgctggaacgcctcgttaccactttatatcgggcctgaaatcagactctacgccagtttgctataaaggtgttgcccgaactcataaaaattaacaaaatttgtcgttccgccatcggctaatcgcattaaggtgtgaggcacgattttgttttttcaggagtcattatgcttgaacttaatgctaaaaccactgcgctggtggtgatcgatttacaagaaggcatcttaccttttgccggtggtccacatactgccgatgaggtagttaatcgcgccgggaagctggcggcgaaatttcgcgccagcggtcagcccgtgtttctggtgcgcgttggctggtctgccgattacgctgaagcattaaaacagccggtcgatgcgcccagtccggctaaagtgttgcccgaaaattggtggcaacatcctgctgcattaggtgcaaccgacagcgatatcgaaatcatcaaacgtcaatggggtgcgttttacggtacggatctggagttgcaattacgccgccgaggtatcgatacaatagtgttatgtgggatcagcaccaatatcggtgttgaatccaccgcccgcaatgcctgggaacttggctttaatctggtgattgccgaagacgcctgtagtgccgccagcgccgagcagcacaataacagtatcaaccatatctacccgcgcatcgcccgtgtgcgtagcgtggaagagatcctcaacgcgttatgatttacatcggtctaccgcaatggagccatcctaaatgggtgcggttggggatcaccagccttgaagagtatgcccgccactttaactgcgtggagggcaacaccacgctttacgccctgccgaaacccgaggttgtcctgcgctggcgtgagcagaccacagatgacttccgcttctgttttaagtttccggcgaccattagccatcaggcagcattacggcattgcgatgatttagtgactgaatttttgacccgcatgagtccgttggctccgcgcattgggcaatactggctgcaactgcctgccacattcggcccacgggagctgcctgcgctttggcattttctcgattctcttcctggcgaatttaattatggcgtggaagtccgccatccacagtttttcgccaaaggagaagaggaacaaacgcttaatcgcggtttacatcagcgcggcgttaatcgggtgattttagacagccgcccggttcatgcagcacgtccacacagtgaagctattcgcgacgctcaacgaaaaaaacctaaagttccggtacatgctgtactgacggcgacaaatccgctgatccgttttatcggtagtgatgatatgacgcaaaaccgggaattatttcaggtctggttacaaaaattagcgcagtggcatcagaccactacgccttatctttttttacatacgccagacattgcccaggcaccggaactggtacataccctgtgggaagacttacgtaaaacgcttccagagatcggagcagttccggctattccacagcaatcttctcttttctgaatttgccacctatcatagacaggtgccatcggccattttaaagggagtttgtatggtaagcgcgctgtacgccgttttaagtgcgttgttattaatgaagttctcttttgatgtcgttcgcctgcgaatgcagtaccgcgttgcctatggcgacggcggttttagcgaactgcaaagcgctattcgcattcatggtaacgcggtggaatatattcccatcgcgattgtgctgatgctgtttatggaaatgaatggcgcagaaacctggatggtgcatatttgcggcatcgttttgcttgctggtcgtctgatgcattattacggttttcatcaccgtctgttccgctggcgacgttccggcatgagcgccacctggtgtgcgctgttgctgatggtgctggcgaatctttggtatatgccctgggagttggttttctccctgcgttaacgcacaatacgccactttctttttcccggatttttacgttatgtctcaccgcgacacgctattttctgcccctatcgccagactgggcgactggacctttgatgaacgggtagctgaagtcttcccggatatgatccagcgttccgtacccggctattccaatattatttccatgattggtatgttagccgagcgcttcgttcaacctggtacgcaggtttacgatctgggttgttctctgggcgcggcgacgctcagcgtgcgtcgcaacattcatcatgataattgcaaaattattgccatcgacaactccccggcgatgattgaacgctgccgtcgtcatattgacgcctataaagcccctacgccagtagacgtcattgaaggtgatattcgcgatatcgccattgaaaacgcaagcatggtggtgctgaattttaccctgcaattcctggaaccttccgagcgccaggcgttactggataaaatttatcaagggctgaaccccggcggcgcgctggtgcttagcgaaaaattcagtttcgaagatgccaaagttggtgaactgttgttcaacatgcaccacgactttaaacgtgccaacggttacagcgaactggagatcagccagaagcgcagcatgctggaaaacgtgatgctgaccgattccgtggaaacccataaagcacgcctgcataacgccggttttgagcatagtgagctgtggttccagtgctttaactttggtagtctggtggcattaaaagcagaggacgctgcatgatcgactttggtaacttttattctctgattgccaaaaatcatcttagtcactggctcgaaacgctgcccgcgcagattgctaactggcagcgcgagcagcagcacgggttgtttaagcagtggagtaatgcggtggagtttctacctgaaattaaaccgtatcgtcttgatttattgcatagcgttacggcagaaagcgaagagccactgagcgcagggcaaattaaacgcattgaaacgctgatgcgcaacctgatgccgtggcgcaaagggccgttcagtctgtatggcgtcaacatcgataccgaatggcgttccgactggaaatgggatcgtgttctgccccatctttctgatttaaccggacgcaccattctggatgtcggctgcggcagcggttatcacatgtggcgcatgattggcgcaggcgcgcacctcgcggtggggatcgaccctacgcaactgtttctgtgccagtttgaagcggtgcgtaaactactgggtaatgatcagcgcgcgcatttgttaccgttaggtattgaacaacttccggcactgaaagcctttgataccgtctttagcatgggcgtgctttaccatcgccgtagtccgctggagcatctatggcagttgaaagatcaactggtcaatgaaggtgaactggtgctggaaacgctggttattgatggtgatgagaacacggtgctggtaccaggcgatcgttacgcgcaaatgcgtaatgtctatttcatcccttccgcgctggcgctgaaaaactggctgaagaagtgtggttttgtagatatccgcattgcggatgtgagcgttaccaccacagaagagcagcgacgcaccgaatggatggttaccgaaagcctggccgatttcctcgacccacatgatccgggtaaaacggtggaaggttatccggcacctaaacgcgcggtgctgattgcgcgcaagccgtaaaggtctggtattactgccggatgcggcgtgaacgccttatccggcctacaaaaccttgctaattcaatatattgcagggactatgtaggcctgataagcatagcgcatcaggcagctttacgtttgcataacctcagcgcccgtttccgggcgctattcacgtcttacgcctgaacagctggctgatcaaacgccgttaacttcggtgcattgcccgtatatttttcgatatacaccaacgcactgttaccggcacaggcatttgccagctggctgctggggatatccgccgttaacacgttcgcactgccgtttttacacaagccattttccagatctggccatgcaccttcatgcacgcataccacgccttttttgatcccgtcagtcaccaccgcgcctgtcaaaatctgaccacgtttgttccagacacgcaccagatcgccattcgcaataccaaagcgtgcagcatcttcggtgtgaatagtgattggttcacgatcggcgatcgcatattttttacgcagttccgcatagttaagctgactgtgtaaacggtgtgccggatgtgcggtcagaagctgtaactgcttctcgtcggcggtacctttccattcatcaggagccagccaggttgggtgtgccgggcaatccttatagccaaatttttccaacgttttactatagatttcaattttgccgcttggcgtacccagcgcatttttcaccggatcggcgcggaaatcaccataacgaacgtactgttcgttcttctcgctgtggcgcatttcgatcagtttattttgctgccagaaggcattaaacattggcatagtgacgcgttgcgcacgggcacctttctgagcggcatcatagaaaaatttcagccacgccatttcatctttaccttcggtatagatctcttttccgccaggtttgagtaattccgcaagatcggcaaacacgtcaaaatcgttacgcgcttcaaattgcggagcaacagcctgcttcatcggcacaatatgctggttgctgtaatcaccggtcatcgtcaagtcattgcgctcaaagcttgtggtgatcggtaatacgatatctgcgtgtttggctgctgcggtccagtagcattcagaaacgacgatcatctccggtttctgccatgctttaatcagacgattagtatcctggtgatgggtaaagttaccgccacccgcccaccagatcattttgatattcggatacgtttgttctttaccgttatgctgatatttgccgccaggattttccagcgcatcgacgatacgggcaacaggaatcgccgtcattccgccatcatcagcggcctcgctggcatgtccggcaatcgccgcagacatttccggcagcacgccgccaacacgcgtcgggttgccaccgttggagtaatgataagagaaaccaaaaccgccgcccggtgtaccaatctgccctaacatcgccgccagcgtcaccagcatccagtgtttctgttcaccatattgctggcgctgaattccccagcctgccatcagcattgtgcgattcgccgccatcagttcagcgagtttgactatctgcgcttccggtacgccagtaatttccgccgcccagaccgcgctcttcggcgtattatcgctcttacctgtcagatactcttcaaactgcggatacccggtagtgtatttttcaaggaacactttatcgtgtttgccttgtgtcatcagggtatgcgcaatccctaacatcagtgccacgtcggtgcccatattcggcgcgatccaggtggcattatcgtcaaagaattcgatggtttcggagcggataggatcaatggcaatcactggtttgccagattttttcagctgatggaagtattccagcccttgctcatcggtactgctccaggcaatttttaaggtattcagcgggttcattccccacagcaccacaacctggctgttttccagaatcagcggccaggaggtctgctgttcatacacctctacagaaccgaccacatgcggcatgatcacctgtgctgccccggtactataatcgccgctatgcccggaataaccgcccgccaggttcatataacgttgcagtaaggtttgcgctttatgcaacacgccagaagagcgccagccgtaagatccggcaaaaatggcgcttggtccgttagctttacgaatacgatcatgttgctcatgaatcagttttaatgcctgttcccagctcacctgtacataggtatcttcgccacgacctttcgccggttgcagtggattatcgagatagctttttctcaccatcggatgctgaatacgcgccgtggtgtgtacctgatccgccgccgtagactgtaaggaattcggtatggttttcgccagcgcgcctgtactagaaacaatcttgccgtccttcacttctacgttcatcgctccccaacgtcccgcggtgaggattttaccgcccttctcttctgcccatgcggggagcggtgctgcgcttgtcaccaccagcgctccagcggcaataccgctgtgtttaataaattcacgtcttgttaatgtcataacttcctccctgatcaacgaggatcactgtttctcggtaatatctttggcgttgtactggaaataccgcgttaaaatgtccagttcgttttcgctcatgctggttcgtgcccccattcctttggcaatggacggccacgcattgacggtgtaatggtcggcggcaataggggcatgacaaccagcgcaataggtatcgtcaagtttttcagcgtattgccatagcggtttacggtccgctaatgcgggatcggtaagcgcaccctgtaaagacgcctgacgccattgattgccgtattcgtcagcctgccattccccgtttacagtgagcgccttgataccttcttcacttaatgtggctagcgccagccgttgacctgccgccaggtagagcgtgttttcactgccctgcatttgataaccctgcaacagaacgatcggctgtttgccactggcatcaacgacggtgagatcggttccaggattcacggtagccagctcgcctatgtgagaagttttgaaaggataaatatgtgcgccattagtaacactagtagcggcctgactttccagctcatgcgccgcgttgtcatccatttttatttctggcggaaaatgggcaatgcctttatgacaatcgatacaggtttcgctgtccttttgtgctttgttatgcattttctgcgcagattcactttggctggcaatatccatggcatcaaaagaatggcaactacggcacgttgcagagtcagtggcttttaattctttccatactgtttcggccatttcctggcgatgagcttcgaacttatcgtcactgtctattttgccgctaacaaattcatgataaatatctttagatgcctttaatttagcaaataaataatccatcccactctttggaatatggcaatcggcacattccgcacgtatccctttctggttgctaaagtggacagttccctgatattcctcaaaaggtttactcatgctgtggcaggaaaggcaaaatgctgtatcgctcgttttatgtaagactttttgcgccagcaataacccgccgccaccaaccacaaccgctatcagcaaaaacaataacccaatgcgttttttccctcgcatagattcctctaattaaattactggacaccgaaatcattgtataattaaatatacaacgaattaaccgcttgcataattaggcacaacactgcctgaaacaatcgataaagaatatgatttattacaatgtaatcattaattgctaaggaataacccagttgctatttagaatatatatttatcagttttagtaatttaaatcccataattaatgtgaatatatacaatatttttagcacaacgctatgcgcactgtcacccgctcaacagatcacggttatcgttcgttttttatactgttcagggataaaaaaaggcccctgttgaaattgcaggggcctggtacgagcaagcatcatattgggcgacatgatgcaacggtaaaaatcatttggcctgatggcgttcaatgattcctttcatttcagcaaccgccgccccgtctacgatataacggctatactcgtccgcgtgttcatcactactcatggacaatccttgattacgataacgcatcggactggcttgccacgctcccgcggagctatggacttccagcactccggcatcgaggaagtggtgcaggttttctgcacggactcctgctccggccataatgattggagcatcacgatgggcaataagttccataattttacttaaaccttgcagtgcgtcacttttttgcccacttgtcagtacccgggcaatgcccaattccgcaagattattgagtgtatataaagggttagcgcacatatcgaaggcgcgatgaaaagtcactgccagcggaccggcagcagccattattttttccattcgtggcatatcgacattcccgtcaacatcgagaacgcccgtcaccagtccaggaaaacctaattcgcggaccgtgcgcacatcctcaagaatggcggcaaactcaccgtcgctgtagcaaaaatcaccaccgcgtgggcgaattatcggatgcacagggatcgtcacccgctggcgcacggatttcagtacacccaagctcggcgttaagcccccctcttttggggctgcgcataattcaactctgtctgcgccgttttgctgcgccgttagtgcacattccatgctgtaacagcaaatttccagtaatgccatttttactccttaattacgcgctctgctcgctggcaacgatctcttcaatggaccacggatgaaacttaatagttgttttgccatcggtgaccgccagcgtcggattcggtaatcgctcatgctcaccttttgggctactggttttcacactgatccccggtaggctgagtccttcatcagaaagcaatgccagcgcacgggcattcagcgtttctggatcacccggcagaacgatttcaatatgttcccaaccttcgtgtgggtaacgtttttccccgggccacggtagctccacaatagaaaactgccagtgcgcaacctgtaccggttcatgcaatttaaacagacaaatcggtctgccattgatcatattttcactcaaaagctcgccacactgttcaaacccgcgacgccagcgttcagcagtggcgttttgatggcaacgcaaagaaatgtgatcggcagtcagcggagtgatattcaaccccagacggcgggaaagttcatctaatgcgtggataaatcgcggtaaatcgcttgcaatatcctgcagctcgtcgatagattgccagttcgccataatcactcttcgtctttcagtaaaagcgttaatttaccctgttgccctgtgccaaccaaccgctgatttcacgccgcttctgatgcaatagtgaaaacggcaatacgccacgcgcacgttgctgacgaaaacagccatttgcagtatactcccgccctaatttctttaactggtgcgggcaatttttgctcgcttcatcaatgtaaggtattccggtgaatattcaggctcttctcagtgaaaaagtccgtcaggccatgattgcggcaggcgcgcctgcggattgcgaaccgcaggttcgtcagagtgcaaaagttcagttcggcgactatcaggctaacggcatgatggcagttgctaaaaaactgggtatggcaccgcgacaattagcagagcaggtgctgactcatctggatcttaacggtatcgccagcaaagttgagatcgccggtccaggctttatcaacattttccttgatccggcattcctggctgaacatgttcagcaggcgctggcgtccgatcgtctcggtgttgctacgccagaaaaacagaccattgtggttgactactctgcgccaaacgtggcgaaagagatgcatgtcggtcacctgcgctctaccattattggtgacgcagcagtgcgtactctggagttcctcggtcacaaagtgattcgcgcaaaccacgtcggcgactggggcactcagttcggtatgctgattgcatggctggaaaagcagcagcaggaaaacgccggtgaaatggagctggctgaccttgaaggtttctaccgcgatgcgaaaaagcattacgatgaagatgaagagttcgccgagcgcgcacgtaactacgtggtaaaactgcaaagcggtgacgaatatttccgcgagatgtggcgcaaactggtcgacatcaccatgacgcagaaccagatcacctacgatcgtctcaacgtgacgctgacccgtgatgacgtgatgggcgaaagcctctacaacccgatgctgccaggaattgtggcggatctcaaagccaaaggtctggcagtagaaagcgaaggggcgaccgtcgtattccttgatgagtttaaaaacaaggaaggcgaaccgatgggcgtgatcattcagaagaaagatggcggctatctctacaccaccactgatatcgcctgtgcgaaatatcgttatgaaacactgcatgccgatcgcgtgctgtattacatcgactcccgtcagcatcaacacctgatgcaggcatgggcgatcgtccgtaaagcaggctatgtaccggaatccgtaccgctggaacaccacatgttcggcatgatgctgggtaaagacggcaaaccgttcaaaacccgcgcgggtggtacagtgaaactggccgatctgctggatgaagccctggaacgtgcacgccgtctggtggcagaaaagaacccggatatgccagccgacgagctggaaaaactggctaacgcggttggtattggtgcggtgaaatatgcggatctctccaaaaaccgcaccacggactacatcttcgactgggacaacatgctggcgtttgagggtaataccgcgccatacatgcagtatgcatacacgcgtgtattgtccgtgttccgtaaagcagaaattgacgaagagcaactggctgcagctccggttatcatccgtgaagatcgtgaagcgcaactggcagctcgcctgctgcagtttgaagaaaccctcaccgtggttgcccgtgaaggcacgccgcatgtaatgtgtgcttacctgtacgatctggccggtctgttctctggcttctacgagcactgcccgatcctcagcgcagaaaacgaagaagtgcgtaacagccgtctaaaactggcacaactgacggcgaagacgctgaagctgggtctggatacgctgggtattgagactgtagagcgtatgtaatcgatttttcgtgagagtgaagcctgatcagggttagccgatcaggcttttttattgccatctaaatgtattctgaaaatggacatgccattgttttctcactgttggataagaggccagaagcgtaatatccggccccagggaaacgataacggttgaatttaaggaataccgcagtgtttaaatttcttgtattaacattaggcattatctcttgccaggcttacgcagaagatacggttatagtaaacgaccatgacattagtgccatcaaagattgttggcaaaaaaatagtgatgatgatactgacgttaacgtgatcaaaagttgcctgcgacaagaatacaatctcgtcgatgcgcaattaaataaagcctatggtgaagcttatcgttatatagaacaagtgccacgcacaggtgtaaaaaaacctgataccgaacaacttaacttgcttaaaaaaagtcagcgagcctggctggattttagggacaaagaatgtgaattaatccttagtaatgaggacgttcaggatttaagtgacccttattctgaaagtgaatggctcagttgtatgatcatacagaccaatacgcgaactcgccagttgcagctataccgtaactctgaagatttttatccaagccctttgacaagaggataattcacatctttttggcatgttttgttgcaagctattcctgataaataattgcaacaagacatcgagcctttttcactgagttattaaacatactcgcgagcgcgtcgctacgctagcaagcaaaaatgaaacaggaataatcgaaatgggatgttgcgcacagtcaaaataactcaccgtaaataatcatctgctataaataatcactttcatgcaataccagataagctatttttaaacagacacttaccgcacaacaaactaattaaatacaaagaaaggcaacaatcaacttaatgttaatgaaatgttttacatatattaaccacttgtttaatgcggagaatcagtacactattttcttataattacatttgaaattatatgatcaccgggagtgattgattaattatctttactaataatcagactaatatttacctgtttgaccgagttgggattgcgtcgtttctccattaggagtaaagctttaatgtcacctgaagttcacagaataaggaacaggttatgagctatagcaatattcttgtcgctgttgcggttacaccggaaagtcagcaactgctggcaaaagcggtatctatcgccaggccagtaaagggacacatcagtttaattactctcgcttccgacccggaaatgtacaatcaattagctgcgccgatgcttgaagatttacgcagcgtgatgcatgaagaaacgcaaagctttcttgataagttaattcaggatgcggggtatcccgttgacaagacgtttattgcctacggtgagttaagcgaacatattctggaagtatgtcacaagcatcatttcgatttggtgatttgcggtaatcacaatcacagtttctttagccgagcatcctgcagcgcgaaaagagttattgccagtagtgaggtcgatgtgctgttagttccacttacgggagattaaccgctcttacgcaagctttggaaaggtagcaactttatcgcgctgctggctttccgcgcttcgcggaactatctgctttaggtcgctaatgaagcactcctgccagtggttaatatcgtttttcacgataacgtccagcatttctgcatgacgggaaatacgttccgccaggctcatagtcaatgcacgatccagcgcagctgcaacttcgtcacgatcgtaggggttaacaattaacgcgctcgttaactcgtttgccgctcccgcaaattggctaagaacaagaacgcccggattggctgggtcctgagcagcaacatactcttttgctaccaggttcatcccgtcacgcagtggcgtcactaagcccacgtcagagtagcggaatattttcatcagtaatttacggtcaaaatgctgattcaaataataaagcggcgtccagcctaattgcccgtatttaccattaattcgtccagcttcattttcgagctgatgacgaatatcctgataggcttgcacatcaccacggctcgttggtgcaatctgggtataacgaattttaccatgatgctgcggatatttttccagcaacgcttcataggcgagaaaacgctctggcaaacctttggaataatccagccgttcgacagaaaagatattttgtacgtttttcagttccgctttaagttgcgccagttttggcggcagtggcccggcagcctgtttggctatttctttcggttcaatgccgatcgggtagacttctgttcgaaatgctttgccccaggctgtatggctttttgcgctacgtgtcgtgacgcgggtcaggttagaaagacaatccaggaacgccagacgatcgttttctgtctggaaacccagcaaatcataatcacaaagctgttcaagcaaggtgtcatatgtcggcagcgcgttgaagatttccggtgtcgggaaaggaatatgcagaaagaaaccaatgcgattattcactccccgtttgcgtaattcatgcgcaaatggcaacaggtgataatcgtggatccagataatgtcatcgtcttgcaacagcggcagtaatttatctgccagcaacgcatttacgcgtagatagccgtcccaggcaggacgctgaaattgcaccagatcgagccgataatgaaaagcgggccagagaacggcattggagaattggttgtagtattcgtcaaggtcctgttcgctgaggttaaaagaggcccacgtaatgttaccttttttcaccttttttagcggctgatcctcattccctgtttcaccactccagccaaaccacagtccgcctgcggctttcagtgcccccagtatgccaacggcaaggccaccggcactggcggcgtgctcgtctggtggtgcaatccggttagatactacgactaaacgactcatagtcatcactcctgttatttttacttagatactacgactaaagctctcatagtcatcactcctgttattttctcttttttgttgtaatgcggtggttatcatttcaagccagctccagacatccggcacacccgccagtcgccaacttgcctgagttgcacctgtgccaatttttacactcattccgcccagtcggttaacgactgcgaagccagattcatcggttaaatcatcgcccagaaatacgggcgttcgcccgataaagggagcttcctgcataaaagctgcaattgcctcacctttactggtacctctcggtttgatctcgacaacacactttccctgctgtaacgccatttgtggccagatctgagtaatacgttgcgctaatgtcattaatgcgtcttcatgctgcggagcctgacgataatgcagcgcaaaagccatccctttcgcctccagctccgcgccgggatactgagcgatgactgtatgcagttgcacgctaatatcacgcgcaatcgcatccggcagatgaacgatatgtgttttaccattgatgtcacggcgctccgccccatgcacgcccgctaacgggaagcgataaggttttgccagtgcgtcaagctccaccatactgcgcccacttatcaatgccaatgcaccatcacttgcggttgccagtagctgtagtccttgcagaatattgtcaggcacgacgacctgatcgggatgcggtttgatttccgccagcgttccatcaagatcaaaaaaccaggcatatttcgcggatagttcaggggtttcggttaacggttctgtcacccggttctcctccttctcttttcttattgtgttgcgcagaacgcgctttacagacatgtaagtatagacagtgtgacgggggtcgccatttgcaacgaagaacagccaaccgttatggcggttggctatggtgggaaaaaacgctaaattgttgcagaaaaaagcatcagacagtgcgtttcgctttttgcttgtaacggtcgaagatcaccgctgccagcaggattaagccgcgaaccacgtactgcgcgaaaggagaaatattaagcaggttcatggcgttttccacggtgcctaaaattaagatacccgccaccacataactgatttttccgatgccacctttcagagaaacgccacctaaaacgcaggcggagataacaatcagctcataaccaatgctcgtcattggctgcccactggtcatacgactagccagaataattccggctatcgcacttaccaggccactgagaacaaagataataattttggtgcgaacaaccggtacacccgccagacgcgcggcctcttcgttcccgccaatcgccagggtgttacgaccaaaggtggttttattcagcagcaaaccaaagataatcagacacgcgacggtgagccagattggcgcaggcagaccgaaccagttggcgtaaccaagggcaaagaagctttcatcttcgataccgaccgctttaccgtcactaatgatgtacgccagacctcgaacaatctgcatcgttgccaatgtcgtgatcagagcatttattttcagtttggcgataacaaagccattgaccaggccacagagaacgcccagcaacaaccccgctgccacgccaatccacaggctttcagtcaggttaataaccaccgccgtggtgacacccgcacaggcaattacggaggcgacagaaaggtcaaagtcaccggaagcgaggcagaacaacatgccacaagccaccatcccgctcatggaaattgccaggcccaaccctttcatattaatgaaggtggcaaaatttgggacaaaaatggcacaggcgataaagagcaccgcaaacaccaccagcatgccgtactgatcccagatacgcccgaagctgaaactgctcttaggtgcgccagacccgcttgtagaaacagaagacatcatactctccttactcaggcaacagcctggctgactttaggcatcgcaaggctcagtgcctgacgctcatctgcctgctcgtgtaacaattcaccggcgatttcaccttcccgcatcaccacaatccggtcggcaacgccgaggacttcaggtaagtcgctggaggcaaacagcaccgccacgccctgcgccgccagcgcataaattacgttatatatttcgtgcttagcgccaacatcaatgccgcgcgtaggttcatccagcaaaatgaccttcatctcttcgcttaaccagcggcccagaatggctttttgctgatttccgccactgagattcatgatcagttgctccgcgcccggcgttttgatgttgaggctacgaatgtggtgatcggcattgttttcttcccaaccgttgttgattacacaaccgccgagcacatgtttacgtctggcactgatgttgatattgtcgcgaacggagtgcacgggaataatgccttccgctttgcgatcttccgggcagagcatcatgcctgcggcaatggcgtggctcggtttacgaatatcgatcggctgttggtcgatataaacctgaccggcggtgatttgcgtcccgccaaacatgcctttcattaattcgctacgccccgcccctaccagaccaaacagcccaacaatttcaccactgcgaaccgccagacttattggcgtacgcacgcctggtgctttcacagcatcaagacgtaggcgctcctcgccataactacgcggttgccagccgtagatatcgccaatgtcgcgcccgaccatcgcctgcaccagcgcgtcgtggtcaacctgctgcatatcggtaaaggttttgacataacgtccatctttaaagacagtaatggcatcgctgagggcaaatatttcttccatacggtgagaaacgtataagattacccgcccctcttttcgcagttcacgaataacgcggaaaagattgtcgatttcacgggcagagagggagctggttggctcatcaaaggcgataattttggcgttacgcgccagcgctttggcgatttcaaccatctgccactgaccaatggagagatatttcagcggcgtgtccgggtcaatatccataccaagatgtttaagttgtaaacccgcctcataattcagcaaactgcgattcacaatgccgcctttatgcggcagctggccgagatagatgttttccgcgacggtcatttccggcacgagatgcagttcctggtaaataatcgccacgcccgcgttaagtgctgcggtcgtgtcggaaaaggacatttcctgcccattaatcactacagaacccgtggttggcgcatagttgccgctgaggatttttaagagagtactttttcctgcgccattttcacccatcaacgcatgaacctgaccggcatagcagtcaaaactaatatccgtcagcgccttaacgccgggaaacgttttaccgatgccgcgaaaactgagatacggggtagactgttgcataacgtctccgtgaatcactggtcgttcacaccccctctgcatcatgcagaggggaatttttccggcaaattacttaccgcctaaaccttttttctccagttcttctttaaagttgtcacgcgtgatcagtaccacgtcggtaacttcggtaaattttggcggttcaacgtcttttgctacccagttgtaaagcatttcgctggatttatagccatgtacgtccgggcttggcagcagggaaccgtagaagccggttgcctgtgctttagacagttcgctcaccgcatccacaccgttaatgccaatgccgatgatatcggccgctttaaagccctgaccttccgtcgcgcgtacgccgcccagcacggtgctgtcgttcataccgacgatcagccaatgtttaacttccggatgttgaaccagcatactgttggcagcgtcaaatgcccccgggatgtcgttagatttggtaggtacctgataaatttgtttttccgggaatccggccgctttcagcgcatccatagatcccgtagtacggcggcgggcggtatccagttcgttggcggtaatcgccatcaccgcgctttctttgacatcccagccacgtttctgcatctctttatacagttcctggccctgacgttcgccaattttagtcgccgccatcatcaccagcggaacggtatccattggcttacctttggcgttaacaaactggtcatccacggcaatgactttcatatcgtagccacgcgctttcgcgacgatggcagagccgagtttggggtccggagtacaaataacgaaaccttttgcgccactggcagccaggctgtcgatcgcgttcaatgttttttcgccatccggcacggcaatcttaataacctcaaaccctaaatccttcccggctttatcggcaaacttccattcggtctggaaccacggctcttccggttgcttcaccagaaaaccgagcttcaggttctccgccatagcggattgactcataacggctgccagaccaatggctgccagggctttagtaaatttgtgcatggttctctccagctttagtgtcgttttgtgtagggcaaaaacgaatgacattcgttaaattaatcggaaaacaaagcattaccttttaactaaaagataagtgactgtgttgacatagttttagcgagaaattaattctccataggagagcaatatcacatcgcagaattacagtgagaacgtgcataaatttagcgggaaaagacataagggaaagccaatttgtcagacaaattgtcgaatgcacagcagattaatccataagattagcctggaaatccttgttgtctttggtacccatgcgggatgtcttctttttaaccagtcaataggccgcattacctggcgttgagtttttgaaatggtgtaataaccgcaactcaaagatgtggaaaatgcacgtcattcatttcgtcattaattatcactgtgctcattaattaacagaacacgtataatgagagccatctcgcaaaaatgaaaaaacgttttataaaatcatcacttcatcatgaattcaaattcattgattaatatcaacaagatacaaaaagcactatcattaaaattcattgcagttacattgatttcatcaatgaaatgtaaaaatatataaacttgatgatttaagcattttcttatacccgttcagacgttattcttatttcagatcatcgtcagaattgactccacgatcacatttcggaccggcagaaaggaattattctgcaaacagtaattatggtgttttgatttatcttgcacctctccacttctggatataaggatattaggtatggcaaccgctggaatgcttctcaaactcaactctcaaatgaaccgcgagttttacgcatccaatctctaccttcacctgagtaactggtgttctgaacagagtctgaacggcaccgccactttccttcgcgcccaggcacagagtaatgtgacccaaatgatgcgcatgtttaactttatgaagagtgtcggcgctacccccatcgttaaagccattgatgttcccggtgaaaaactgaactctctggaagaactgttccaaaaaacgatggaagaatacgagcaacgttctagtacgttggcacagttagccgatgaagcgaaagaactgaatgatgatagtaccgtcaatttcctgcgcgatctggaaaaagaacagcagcatgatggtctgttgctgcaaaccattcttgatgaagtgcgcagtgcgaaacttgcgggtatgtgccctgtgcagaccgaccaacatgttctgaatgtcgtgagtcaccagctgcattgatcatcatcggcgctaatgcattgcgccgatgaaggttttgagaaaccgctgcctcatctgtttgaagcagcggtttttttaatgggattcaccctgtggggtaaacttgagttcaataagcgcgatggctttttggattgcccgcatggtgaccgggtctgcggcggcgggatggttagtaaagtcgatattcttcagctgactggacattttttcacgaacttcaacgggcgcgattacatcgagaacatccagaatttgtttgataaccaactggcaagcaaccacatcagaaaccaattcctgatcggcattcagcggctgggacatcgtaaactcctgatagcattttgaaagccgttatagtagcgacttcacatcttcagcgatagtcacatccaccgtcatcaggacacaaaaaaacctgccggagcaggttttttgttatcggaacatattgcctggcggtacgtctttgaacgtcttgcaatagttattgaacatacttttcaggattttgcgcagtttcatcgcggcactccgaccatttgttatacaggtgttattgtctttgcgcttataatatgacaaccatcacaaaaatcaatctttatgtgatacaaatcacataaatacccctttaatgttataaaaatgataatcaaaaaacagcccccctatttctgacacctacagatggcaagaaatagcgcctgccaggcgtcttttccggccattgtcgcagcactgtaacgcgtaaaatagtgctttctcttactcttctggctggaccatgagacttctgattctgactcttagtttaataacgctggcggggtgtacggttactcgccaagcccatgtgagcgaagttgacgcggcaacaggtattgtacggttagtttatgaccaggcttttttgcagcatgcccataccgatcgttatgtcagtcgcgggatcgccgatcgcgcatgccagcaggaaggctatacccacgcggtcccctttggtcagccagtaggcaactgtagcctttttgcgggttccttatgtttgaatacggaattcactttgagttatcagtgccatcattccgccttccctgtctttctctaaatattttaatcagcgaggggatcttcgctgattaaagaaatagcggtaatgcgttttattcccattcgtatttttaataattgaagtttatattttaccttttgcaaataataaaataacaaattatagtgacgccacagcaacaaatataacctttgtggagcactatcatgctgaaaccagaaatgattgaaaaacttaatgagcagatgaacctggaactgtactctagtctgctttatcagcaaatgagcgcctggtgcagctatcataccttcgaaggtgctgccgcgttcctgcgccgtcacgcccaggaagagatgacgcatatgcagcgtctgtttgattacctgactgataccggcaatttaccgcgtattaataccgttgaatctccgtttgctgaatattccagtcttgatgaattattccaggaaacctataaacacgaacaattaatcacccagaaaattaacgaactggctcatgctgcaatgaccaatcaggactacccaacatttaatttcctgcaatggtatgtttctgagcagcatgaagaagagaaactgttcaaaagcattattgataaattaagcctggcaggcaaaagcggcgaaggtctgtattttatcgacaaagaactctctaccctcgacacacaaaactaatgctctccggcggcaggtttactgccgccgtttcaaatcagtgacggcaaatcttactctgatcggtgctaaaaccgtctttgctaggtataaatttgccttttgctgccagaaacgctaccagctctcccgctgtcatcccttctgcgctgcaggtgtgaaaacgtgcctgttcaccaaaacgcgctttaatcgcagcttccagactggcatgcgtatattgctcgccactttcaatcatcatatttaacacttcatgaccgtgaatagagtccatcgtccctcctcaaaaaaagcctagcgtagcgattgccgcttatgaagactttgcgccagcgcaggactgaatgctttttattgtacatttatatttacaccatatgtaacgtcggtttgacgaagcagccgttatgccttaacctgcgccgcagatatcactcataaagatcgtcaggacagaagaaagcgtgaaaaacagaaccctgggaagtgtttttatcgtggcgggaaccacaattggcgcaggcatgctggcaatgccgctggctgcggccggtgttggttttagcgttacgttaatcttgttgattgggctttgggcgttgatgtgctacacggcgctattactgctggaggtgtaccagcatgttccggcagataccggtctgggcacgctggcaaaacgctatctgggacgctacggtcaatggctgacgggcttcagtatgatgttcttaatgtatgctctgactgcggcatacatcagcggtgccggtgaattgttggcctccagcatcagcgactggacaggtatttctatgagcgcaaccgctggcgtgctgttgttcacttttgttgccggtggcgtggtttgtgtcggaactagtctggtcgatttatttaaccgttttctgttcagcgccaagattatttttctggtggtaatgctggtactactgctgccgcatattcacaaagtgaatcttttaaccctgccgttgcaacaggggctggctctgtctgcaatcccggtgatttttacgagctttggttttcacggtagcgtgccgagtattgtcagctatatggatggcaacattcgtaagctacgctgggtgtttataatcggtagtgcgatccccctggtggcatatattttctggcaggtggcgacgcttggcagcattgatagtacaacctttatgggattgctggctaatcatgctggattaaacgggctgttacaggcgttacgcgaaatggtggcctctccgcatgttgagctggcagtgcatttatttgctgatttagccctcgccacgagttttctcggcgttgcgttaggcttatttgattatctggctgatttatttcagcgtagtaataccgttggtggacggttgcaaactggtgcaattacgtttctgccgccgttggcgtttgcactgttttatccacgaggatttgtgatggcgctgggttacgccggtgtggcgctggcggtactggcattgattatccctagcctgttgacctggcaaagcagaaagcacaatcctcaggcgggttaccgggtcaaaggtggtcgtccggcgctggtggtggtgtttctctgtggtattgctgtgattggcgtgcaatttttgattgcggcagggttgttaccagaagtggggtgatcagatagcctcaaattccttattgggtgccagaattaacgctgacacccaatttggcctcttaatgcaggcagcactgcttaaatttcttaccactaccgcacgggcaaggatcgttacgccccggtttctcttctgctttgatcggttgctgaacagctttttcctgcggatgcgccatccagtacgcatgtagatcaagcgccgccagtcgaatggcatctacgctctcttcaaacgcttctgggctcatcttttctacccgctcgaagttttcctcagtaccgtgcagcgcaatcgcctccagcgctggttttaagctatcgggcaacgtactccagtcagaaagtgccacgccccgcatatagccaaagcaccactcctcaacaatcgtcagctcgctgccatcaacttctcgcaagccgaataacggctcaaactgctccgggaattcgttcagacgctctgcggtatcggccatatgttgaaaagccagattcataaagcgcgtcatctctttctcactcgcccagcgcggcacatagtcagccccaccccacacggcaaccagccactgttccggttcaatctcttgcggagaactcaacaccgccgtcaataaaccgtccagctccgccacatcaaggatggcgtggtcagtgttgtatttggtcagaatatcgtccagccattccaactcactttcgtttaacggtcccgttttcatacgcttttccttgtggatctcaactcgccagcacctatcttacatgccggtccgtatcagagatactttttgagtggctttgctggtgattaaaaattaaggagggtgtaacgacaagttgcaggcacaaaaaaaccacccgaaggtggtttcacgacactgcttattgctttgattttattcttatctttcccatggtacccggagcgggacttgaacccgcacagcgcgaacgccgagggattttaaatcccttgtgtctaccgattccaccatccgggctcgggaagaaagtggaggcgcgttccggagtcgaaccggactagacggatttgcaatccgctacataaccgctttgttaacgcgccaaattcttcaggcctttcagccagacatccgcttgacgccgatgtcttttaaactggagcgggaaacgagactcgaactcgcgaccccgaccttggcaaggtcgtgctctaccaactgagctattcccgcattcatcaagcaatcagttaatcacttgattttattatcgtctggcaatcagtgccgccgttcgatgcgttgcattctacttacctggcgcgatgagtcaacgatatttttcaccacttttgatcgtttgctgaaaattacgccgaaacgatcactgatcaagcaaatctgcacgcgcagcgctcaaatattgcaacatactccacagagtcagtaccgcagccacaaagaaaagtgcaataccggcgtactcaacccaaatgttcggacgccacagcagccatgccaacgccaccatctgggcagtggttttcactttcccaatccaggagacggccacgctactgcgtttacccaactccgccatccattcgcgtagcgcagaaataataatttcacgggcgatcatcgttgccgccggtaatgtcacccaccagctgtgataatgctcggttaccagcaccatggcgatagccacgagaactttatctgccacagggtcaaggaaagcaccaaaccgggtactctggttccagcggcgtgccagaaaaccatcgaaccagtcagtcaccgccgcgacgcagaaaatgagcgcggcggcaaacgggctccaggtgacaggcagataaaagaccaatacaaagaatgggataaggatgacacggaacagtgtaagcaacgtagggatattaaattgcataatgacgggtaactatctgttgtcagtaagattacccctatgttgctacagagacatcaatgtttcaagctccagaagatcttttctgccagaccttggctaatacccggcacttttgcaatttcctcgacgctggcgttacgtaaaccttgcaaaccgcccatatatttcaacaacatttgccgacgttttggcccgacgccttcaatggtttccagggaactggtatttttgaccttcgcccgttttttacggtgcccgccaatcgcgtgatcatgactttcatcgcgaatatgctggataacatgcagcgcgggactatctggcggcaaactaaatccctcaccttccggctcaaagaacagcgtttccagtccagccttacgatctgctcctttggcaacgccaagtagcagcggatgatttttatcccaactgacatccagttcggcgaagacatttttcgcctgcgcaagctggcctttgccgccgtcgataaggatcacatccgggatcttactgtcgtcaatggctttaccataacgccgacgcagcacctgattcatcgccgcataatcatcgcccggcgtgatgcctgtaatgttatagcgccgatactccgcacgcagcgggccgttagcatcaaacaccacacaggaagcgacggtttgttcgcccatggtatggctgatgtcaaagcactccatccgcttcacttccggcaatttcaacacgctggcaagcgcggtcagtcgctggtgaacggtagattgctggctaagtttgctggttaaggccgtcgccgcattggtgcgcgcgagtttcagataacgcgccctatcgccgcgaggtttggtttgaacattaatcttgcgtcccgccagttcactaagggaatcggcgagcagcgttttatcgctaagattaaaatcgagcaggatctcacccggtaaggtgcgcatctggctgccttgtaaatagaactggcctacgaaggtttctaccacctcgctcagttccgtaccgccaggcactttcgggaaatagctgcggctgccgagcactttgccctgacgaatgaacaatacgtggacacaagccatgcccgcatcgaacgccacaccaataacgtcgaggtcgtcgccggtattggaaacgaattgtttttcggtgacgcgtcgcaccgcctgaatttggtcgcgaatacgtgcagcttcttcaaactccagattctggctggcagtttccatacgactaatgagttgcgtaagcacctgatcatctttgccagacaaaaacaggcgcacatactcgacctgctgagcgtattcttcttcactcaccagtccttcaacgcacggtcccagacagcgccctatctggtattgcagacacggacggctgcgattgcgataaacactattttcgcactggcgaatggggaaaatcttttgcagtagcgccagtgtttcacgtacggcatagccattcgggaacgggccgaaatattcacctttggcatgcttcgcaccacgatgcatcgccagacgcgggtgggtatcaccactcaggaagataaaaggataacttttatcatcgcgtagcaaaacgttgtaacgcggctgatagagtttgatgtagttgtgttccagcaacagcgcttcggtttctgtgtgagtaaccgttacatcaatttgctggatctgggcgaccagcgcttcggttttgcggctagcgaggttgctacggaaatagctggaaagccgttttttcaggtctttcgctttgccgacatagataaccgtaccaccagcatcgtacatgcgataaacgcctggctggctggttacggtttttaaaaacgcttttgcgtcaaactgatcactcactgactacttaatgtctccgcattacacagaccatggcgaattgccaggtgagtcagctcaacatcgccatgaatgtttagtttactgaacatacgatagcggtagctgttcaccgttttcggactgagattgagctgttcactgatctcattgaccttctggcccttggtgatcatcagcataatctgcaattcacgttcagacaaactggcaaatgggctttctgttttttctggttcgatctggcttaacgccatttgttgagcgatgtcagaagcaatgtaacgctgcccactatagacagaacgaatcgcactcacgacttcctgcggagccgcgcctttgctgaggtagcccgcagcaccggcctgcatgactttcgctggtaaagggttttctgtatggacggtaagcatgatgattttgacatcagctgtggaacgcgcgattttacgcgtcgcctcaagaccgccaatgcccggcatactcatgtccattagcaccacgtcaacggcatttgtccggcaccacttaacggcgtcttcaccgcagcttgcctcaccgacgacttttataccctttatatcttccagaatgcgtcgtatccctgcgcgcaccagttcgtggtcatcaacaagtagaacgttgatcaaaggaatatctccagaaatagggataacgctactgatagttagtcattcgtatattagcggtttttattgcaactttgaaacgttaaaaatggtgggtattcgatttttctctcgtttttgtcaattcgattgtccacagttatggtcacgcccgtcaccaacggcttaccggatcgtttcacagtaagccctacgatgaaatgtgacaaaaattgactttattcagcaaaaatgaaaatcagcccgctgaatatgtaacattaattaacccgaacaatacgggcaaaaaacattcatgataaaaatatttattggtcattatattaacgtattttatagcactgccgatatcacgctcaaaaaacaaccactgctatttttagcaaagcttatggtatactccgccgccttaacatttttcaccgcaaattttcattgcaacatgacgaggaaaataaatgagtacgcctgatttttctactgccgagaataatcaagaactggcaaatgaagtctcctgcctgaaagcgatgctgacgctgatgctgcaggcgatgggacaagctgacgcgggccgcgtgatgttaaagatggaaaaacagcttgcgctgatcgaagacgaaacccaggctgcagtattttccaaaacggttaagcaaattaaacaagcctaccgtcagtaatataaaaccggctgatagcgtgcctttcagccggtttttgcatctggcacgcaggacagaaaagagatcaaattaagccagtagcggccgcgtaacaggcaacctgggtcttatttggtgcattaatttttttctgcatgtttttctggtggaaattgaccgtattctcagagatactcaaaatcatcgctatctctgcacttgttttcccttccgccgtccacctcagaatttctttttcgcgcttgctgaaattcatctctggcgtcatcactatttcatcatttaaacgcatcagagccatcagactttcgcgcaccagtaactgcatttttaattgcagttcatcactaagaatgggtatttcgcgcgcgctgcaacgggaaaaggacaaaaagcccagcgcccggtttggcagcattaaatactgagtgacaccgcggcgtaaaccatgtgcgcgcgcggcttcccataacggctgtgcttcgctgaataagtcatcattccacattaaatggccctgactaaagttttcagggttcagcaccggatcaattgcgagaaagttttttgcctgataataactaacccacgcctcagggtaattggtgtaaaaagccactttaggtcgagtgaatggtaccgggtggcggacacataagctatagtaatcgtactccagctgctgagcctgaagctcaatttcatggtagacctcttctgcggtctccatcctctgaaaacgcaacagcatcgtgcgacgccagctgaaaaaatccttatcctgcatagtaaaccgcaacgcccctgagagtgagtatcatttataatgataattcaaactatcacataaataagatttatatataatttatattattcaggcaatgaattacttttgcaagccatcgcattctcttatgttattaatgagttatgctgatttgttaagcagttttatcaggcttgaaatggcgtccagccccgacaggtgaatcgtcggggctgattttttcttattattgcagcagaaacttctcgaggaactggcgggtgcgaggctgctcggttccgtaacgtttatcatgttatcctaaggattatccgaaaaataatacctacgaacatcttccaggatactcctgcagcgaaatatttgttttaagctcactcacatatcgcaacatttactttactttaagacaattccaggcaaattatacaacactttacgggatagtaagtccgcctgaaaaatcgcgagagtggcgcattaggtgacccatgttgttccgtttagtcatgatgaaatattcaggtaaggggaattatcgttacgcattgagtgagggtatgccatgagtacgattattatggatttatgtagttacacccgactaggtttaaccgggtatctgttgagtagaggggttaaaaaaagagaaatcaacgacattgaaaccgttgatgaccttgccatagcttgtgatagtcagcgccctagtgtggtgtttattaatgaggactgtttcatccacgatgcttctaacagtcagcgtatcaagctcatcattaatcaacatcccaatacgttatttatcgtttttatggcaattgccaatgttcattttgatgaatatctattggtcagaaaaaatttattgatcagttctaaaagcattaaaccggaatctctcgacgatatccttggcgatattctgaaaaaagagacaacgataaccagctttttaaatatgccgacgttaagtttgagccgaaccgaaagcagtatgttgcgaatgtggatggcaggtcagggaaccattcaaatctctgaccaaatgaatatcaaagccaagaccgttagtagccataaaggtaatattaaacgtaagatcaaaacgcataataaacaggttatctaccatgtcgtccgactgacggataatgtgactaatggtatttttgtcaacatgcgctaacacattctgactggtggtttcccaccagtcaggctgaataagattactctgctttctccacaaagataccgtcctgatgccctgcttcattaaagaaccagatgccgagcgggtagtcttccaggctaaccaggtacattgtgccttcactaaactcctcaactgccagtaccacgccaggacgacgcggaccgccatccgttttgactgttacccgatcattcaccttcatcgttttcctcctgtggctttgtgccagtgtagaacaatttcgtttttctggcagcgccaggcgcgcgcgagtgctgattttctcgacggtctatacttaagagatgccaggcggacttaacgactggcggcaacaacagagtaacggttgcgaggaaagatgatgaaaaccgcaaaagagtacagcgataccgcaaaacgtgaggtcagcgtcgatgtcgatgccctgctggcggcgatcaatgaaattagcgaaagcgaagttcatcgcagccagaacgattctgaacacgttagcgtcgatggacgtgaatatcatacatggcgtgaattggcggatgccttcgaactggatattcatgacttcagcgtctctgaagtgaatcgttgaatgcacaataaaaaaatcccgaccctgagggggtcgggatgaaacttgcttaagcaagaagcacttaaaaaattcgttacaccaggaaatctgatgtgttcatcaccttatccgcaatttttttcgctgacaagaaaatattcgccatatgaatgattaacgctacttatgaatagaaatgtgacgcacgtcaccccttggtggctctggcgtcagcgggatcgctcccgaaaaaatcatctttgataatttgtgcggttttgagaatcatcctggtaagaggagtactgcgcgactatgtttagtattcaacaaccactactggtttttagcgatcttgatggcaccctgctggacagtcatagttatgactggcaaccggcagccccctggctcacccgtttacgcgaagcaaatgttcccgtcattctctgtagcagtaaaacaagtgcggaaatgctgtacttgcaaaaaacgttggggctacaaggtttaccgctgattgccgaaaatggcgcagtgatccagcttgctgagcaatggcaggagatagacggttttccacgcatcatcagtggtattagccatggcgaaatcagcctggttttaaatacgctacgcgagaaagaacattttaaattcacgacttttgatgatgtcgacgatgcaaccatcgccgaatggacgggattaagccgtagccaggcggcgctgacgcagcttcatgaggcgagcgtaacgctaatctggcgcgacagtgacgagcgtatggcacaatttaccgctcgtctgaacgaactgggcttacagtttatgcagggtgcgcgcttctggcacgtactggatgcttctgccggaaaagatcaggctgccaactggattatcgcgacctatcaacaattgagtggcaaacgcccaaccacacttggcctgggcgatgggccaaacgatgcgcccttactggaggtaatggattacgcggtgattgtgaaagggctaaatcgtgaaggggtgcatctgcatgatgaggatccggcccgcgtctggcgaacgcagcgtgaaggaccggaaggatggcgtgaagggctggaccattttttctccgcccgttaagcgttatcgctcgcgaatacccgattacgcccagcctgtttagcgagataaagccgacggtcggccagactctggagttgttcaaaatcataatcaccggtttcctcgctgctgcttacccccaggctggcactgatgcgtatcgtcgtactcttggcgatcaacatctctttttcatttaatttcagtcgaatacgttctgcgacctccgcagcctccgtcagactcgcgcctggcagaatcacacaaaactcctcaccaccgacccgcccggcaacgtcctgcgcacgcaaggaactgctaattaatccggcagcatgagaaagaacacggtcgcccgcctgatgaccaaagcggtcattaatcgctttaaaatggtcaagatcgacctgaatgacagaaaaaggatgttggtgcgtctgacacaatttagcgagcggacgggctttttcgaacagtgcgccacggttatataaacgcgttaaggtgtcgtgccacgcctgccactgcaagctgctttgcagaacatacatgttgctaaccatccggcgaatcacataccaggagatgagtaacatggtggtaaagagcgcccacagcagggttaatgcaatgctgatactgccgaaatcgccgcgcacgccttcgcttaacgtatggacacgcaccagcacaccgtcgaaatggtccagacgttcccagctaacatagcgactgtccatacgaatgccgccccgcgtgtcatgttccattgcctgcgccagcaaggccagttcacgaggatcaaaaatattccctgttggatggtcaggattggaagaggtcaaaaatctcagcttactgtcatagagctgatactcaccatcgaggtttttatcgatggcgtttcttaaaaattgctgcatagtacgcacgggaatactcatccccagcacgccataccagtagttattactgtctaccggaacactgacggtaacctgcggttcagtattgctggcgtgttccggttggctagtgaaccagcgtaccgcgcggtgacgattttctcgttgactatggccaataaaccagggttgggtgacatagccgtaataacgcgttggaacattgcgcgtaaacaaggtcggctgcgtgctaacgtaaaatccggcacggctgacatacatcgcctgttcaaccatgctgctggagttgtgcgctagtcgcagcaagtaaccaacttccagtgcagcggtaatttcattgtcgaggctttcattttcgcgagacaggagattcccctcgctgactaatgcatcgctcacaccattaactggcagagtgcgtcgtcggttgagttcgattttccaggcgtgctcgtcgcgatgctgttcgaactcggttacagcatcacgcagagaggtgaaatccagtggcgctacgagagcttcgcgcatgccattacgtaaaaagatcagtttgtcgacgttatactgcaaatgcttatcgagcgcgttggcaacgttttccagatgattacgctggctggagatataggcatcttccagcaccaccacttcacgccaggtgagcaaggtggaaaaaagcaataccacgataaagcagagattaacgacatgaccaggccccaggcggcgtgcgagttttttcaaccagctctggttttccatttttgtctcgtgctgcaccctgacgactcccaacctgcttttttatgattctggcataacctggcgatagcgtaccgcaaaacagcgataattttataatggtggcatgataagacgcgactatcattcattgcaggcattagcacaccaggccggatgtgatccggcctgatgttaatgataccctttcacacttcttccgcagaacgactcccctcccccggaacaagctcggtttcatgaaaagcttcccgcttgaccccgtaaccgtcataccaacgacactcaaccataccgctggagtatccagtgacaatcatccgcgggccgccctctttaaccgtaacttcctcactaaccataaagctcatactcgcctccttttttcgagtgaaacttgttcaccttagttgaagatggcgaattttgcataatagccagtgcgagtattaatgtgcctgaccgcgcattttctctacggctttcactcccagcaccacgatgccgccgatgataaatccaagaatcagatttaaaacagtcggtaatatcatcgccactactgcactttgctgcccggcgaaatgttcaatggcgtgatgcagcggcgcaattccatgtaccacaatcccaccgccgacgaggaacatcgccagcgtgccgacaatgcttaacgctttcatcagccagggcgcgataatcaataaccctttacctaatgcctgcatcagcgcgctggatttttccgccagccaataccccaggtcatcaatcttaacgataacccctaccagaccgtagacgcccacggtcactaccagcgcgatgccactaagcaccagcacctgattaagcaacggcgcttcggccacaatccccagcgtgatggcgacgatttccgcagacaatataaaatcggtacgaatcgccccttttattttgtccttttcaaacttcagcggatcctgcgccgccagcttctccagacgctgctggctctgcgccggatcttctttatgtttacgcgcctccagcatatgcagcactttctctactccttcaaagcagagaaacgcgccaccaatcatcaacagaggcgtaatcgcccacgggataaacgcactgatgatcagcgccagcggcaccagaatcactttattaatcaggcttcctttcgccacgccccagaccacgggaagttcccggttggcccgcacgccactaacttgttgcgcattgaggcttaagtcatcccctaatacaccggcggttttcttcgccgccagtttgcccatcacggagatatcgtccagtagtgtggcgatatcatcgagcaacgtcagtaaactactcccggccaaaagcattccctctcatttttattgttgaagggtgtaagtatgaagcaaaaacggcagctctgatacttgcttcacaggtcaacatttttttaacaatcaagtgcaattatatctctcgccagcagaatgattttcacgtttactatgaaccacctttttatttccaccgtgagggattatgcgtttccgccagttgttaccgctttttggcgcgctgtttgcgttgtatatcatttggggcagtacctattttgtcattcggattggcgtggaaagctggcctccgttaatgatggcgggcgttcgattcctggcagccggtattttattgctggcatttttgctactgcgcggacacaaactccccccgctacgtccgctgctcaatgccgcgctgattggcctgttattgctggctgtcggtaatggcatggtgacggttgccgaacatcaaaatgttccttccggcatcgccgccgtagtggttgcaaccgtgcccctctttaccctgtgcttcagccgcctgtttggcattaaaacgcgcaaactggaatgggtgggtattgccattgggcttgccggaatcatcatgctcaatagcggtggaaatttaagcggcaatccgtggggcgcgattctgattttaatcggcagcattagctgggcgtttggcagtgtttatggcagccgcattaccttacctgtagggatgatggcgggtgcgattgagatgctggcggcaggcgtggtgttaatgatcgcgagcatgattgcgggtgaaaaactgacggcgctcccttcccttagtggcttccttgcggtcggctatctggcgctgtttggtagcattatcgccatcaacgcttatatgtatttaatccgtaatgtcagtccggctctcgccaccagctacgcttacgttaacccggtggtcgcggtcttgctgggtacgggactgggtggagaaacactgagcaagattgaatggctggcgctcggcgtaattgtcttcgcggtggtactggtcacgttgggaaaatatctcttcccggcaaaacccgtagttgcgccagttattcaggacgcaagtagcgagtaatcaagcgagtaaatgaatcccctgcgtgtcgatctgcgcgctggcaccttcgccgcagatccactcttccagacgctcggtaagcgcttcatccgtcagcttctcgcgcccacgtaacgcgcactcccagacaatcaatacgcgccagccgagttcctgcaagcgactgatatcgcggcgatcgcgctcaacatttttacctatcttctccagccagaactcggttcgagtcgcaggcactttaaacagatagcagtgatgatgatgccagaagcagccatgggtaaatatcacgcagcgatattcatcaacgacaaaatccggacgtccgggcagactggcgtcctgaacgcgaaatgccaggccctgcccggttaacagactggcgaggcgcttctctatcgccgtatcacgcgtggcaatcgcgcgcatatttttgctgcgagtggccttatcgtgaacgtcggccatgttgtgcctcttgctgacgcttagttatcgactacgtcggccatgttgtgcctcttgctgacgcaacgccaccgcctgtttgatttttggctcaagcagttttgccaccgcggcaaagaccggcacgaccacgctgttaccgaactggcgataggcctgagtgtcgctaaccggaatacggaatttcgcttctcccggcgcttcaaaacccattaagcgcgcgcattcccgaggcgttaaccgacgtggacgatgttgctgattcagcggatcgtcaaagtctttctcacccgtggccatatcccagccgcgatcgattaaaatttccgcgccatctttgtaataacgcgcagacagcgtacgcgtgacgctttgcggattgttcggataaaccattccataaccgaagccgttaccgcgcgcctgatgttttttcgcatatcgatagaggtacttccacagcaccggcgtcaggatatatttcgcctcgaccatcgggtccaacagctgcgccagcgtcactcgctgcgcagggaaacattcgctgatatcacgcagggtaaaatcggctttcagattcagatcgcgacgaaaacccaccagcacgatgcgttcacggtgctgcggcagaaaatgtttgccgtcgatgattttcggatcgtctggcccattatcttctgcatcagccacgtcatagcccagttcgtccagcgtctgcatgatgatgcggaacgttttaccctggtcgtgacttttcaggtttttgacgttttcgagcacaaacatcgccggacgacgcgcgtcgataatgcgtaccacatcaaaaaacagcgtgccctgggtatcgcaggcaaaaccgtgcgcccgcccgaggctgttctttttgcttacgccagccaggctaaatggctgacaagggaaaccggccagtaaaacatcgtgttcaggaatgtgttgacgaatatgttccgccgccgcctcatcactcacgccttctttatggctgagggtgatgtcgcggatatcttcattaaaatgatgcgtcgccggatcgcaataatggttggctttataagtgcgtaccgcatgtttgttccattcgctggtaaacacgcactgtccgccaatgctttcaaaaccgcgacggatgccgccaattccggcgaatagatcgataaagcgaaacgcataatgcggatgatgtgccggtggtttgggtaataacgtttgcagatgggcgaactctttctcacttaaacggtgccatgcgctgtcattcgccagcgcacgttttaaaattgccgcgctccagtgattctcacctacaccattaagctgcgccaccaacgttttaacatcataaatttgcagcagtttctccagcattgcctgtgcggcattcccggtgctgtaactatcggttacacttatattttcctgcatagatttcaccggccatctgagatggccgacaggttaacataattacagccatttagggccacgcgctcagccagcggaactaaacgcatctatcaccttgtgatcgacaccttcattctcccccgccagttcggcactgagcttcgccataaactcgactaaaaaatgcgcgttgtgctgcgccagctgcttgcctcttgcggtttgcatggtttgcggtagcttcagcaacttagtctggaaatgatccagcgcgtagcgtttatcatcaagcgggcgatgctgtgcgaacggatcttcaccatcaaacagcgccacgcccaatgccccactaacggcaaacacgcgcgccaggccaatcgcccccagggcttccagccgatccgcatcctggacaattttagcttccgttgttaagggggcgatttgcgcgctgaaactgtgagcggcaatggcatgacaaacggcctcgattttctccgccggaaattgctcgaactcttcacggagcaggcgacgcgtctcttctgccgccaggatactagaacgctgcctttgcggatgatttttcgccaggctcacaatatcgtgaaaataacaggcggttaaaatcaccagcatatcgacatcgtcatctgccgccagcttctgtgccgtagcccagacgcggcgaaaatgacacacgtcatgggccgcgtcctggtgctgatgatggtttttcaaccagttttcgaactgtgcctgccagtgttgtaagtccatacgcgctccgttgccaaagagtcgccaccttagcagtttttattcatagcgtctgctacgtgcgggacgaggtcgggtgtaccaggcaatgctgcctaacaatgccccgaccagagccataaataaaaatccgaccagtgcccctaaccactttcccgcggtagagcctaaatcgctttcaaatccgctcacgggggcatcgggaatccggctcatcacccagatgtaacgcgccattgcccagacgaaatagccacaccatgtatagaaagcccacaaagccagtttgccgccagggctgcgagagagtctctcttccatctttgtgctaccgtattccattttgagataacccggaaaattcagacttagtactattatgtgataaaagtcacatttttccacattggatgagccagtcaagactcaatcattttttgaacaaatagataaattttgcgcaacggcagtgaatacaggaaaaatcgttttgagcgattttatttatctttgatatcggctttattaattcatttaatcaatatattagcactgattacaattatacctttttattattctgtgtcatgatgcttccgttattagccttttatcgtcttgtttatattttttgggccggcatgatgccggcttttttttatgccttcattaatgtgcgcctgatcacaccagccgtttggcgcaacaatcattgataccccctatgtttccgctcaactcataacatattgatatacatttataattttcatgaatatttatatttagaattcataattatgaattatattaaatagattagaaacattttgatatcttttaaatacatttgttacatgtaatccttaaaataaaatgaacttcatagaatagtatccaaatgtgcttttttttggataacggcacttattgatatattcatgaagattataatcacaagggaatacataatgaaaagaaaagttctggcaatgctggtcccggcgttattagttgctggcgcagcaaatgcggctgaagtctataataaagatggtaataaactggatttgtacggaaaagtagtgggtctgcactacttctctgatgattctggcagcgatggcgacatgtcatatgcccgtatcggtttcaaaggtgaaactcagatcgctgatcaattcactggttatggtcagtgggaatttaacattggcgcaaacggtcctgaaagcgacaagggtaataccgcaacgcgtctggcatttgcaggtttaggctttggtcagaatggtactttcgactatggtcgtaactacggtgtcgtatatgacgtagaagcatggaccgatatgctgccagaatttggtggcgatacctatgctggcgctgacaacttcatgaacggtcgtgctaatggtgttgcaacctaccgtaacaatggcttctttggttaggtcgatggcttgaactttgctttgcaatatcagggtaataatgaaagtggtggaccattcgggcaggaaggttccggtagtggtgatggccgtagcctttccaaagaaaatggtgatggtttcggtatgtcaacatcctacgacttcgacttcggtttaagtctgggtgctgcatatcaaactctgatcgttcagatcgtcaggttggagttggtttaaatgatcgtaaccatagcaacagaaatgctggtggtgaaaccgctgaagcatggactgttggtgcaaaatatgatgctaataatgtgtatttagcagctatgtacgctgaaactcgcaatatgaccccatatggtggtggcgagtttgataatggtgaatcaagatcagccatcgctaacaaaacccaaaactttgaagttgttgctcagtatcagttcgactttggcctgcgcccgtccatcgcttacctgcaatctaaaggtaaggatttaggcggttgggctcatgacggcaacggcgacccacgttacaccaataaagatctggttaaatacgttgatattggtgcgacctactacttcaacaaaaacatgtccacctatgttgattacaaaatcaacctgctggacaacgacgatgacttctacgaagcaaacggcatcgctaccgatgatatcgttgctgtgggcttagtctaccagttctaatcagtcaactcgctgcggcgtgttactgtaaaactgaacactagcctgagttcgtccctcatcgaactcaggcttttttattggcatttcatctccatctgcggcacacgcaattgccgaagcatatcgatacagcaccttaccctgcccctcctggcacaataacatcaaccagctactcttcaagctaacacccaaatgcatttctttatgaattaatccgtaacaaacacgcttcccatatagaaatatttgcaaaaatagtgcatgaaataagctttttctctaccaatccgggatataaatattcatcagcaccacaatattccacagcactaaatctctccccgccaccccgtacctctgataatggtctaaaatcattgaagccacttgcgacgacgttgctcaataaggaaaatttggcgtgaataatattcaacaccagtgcagcatcatcattacatacttacagccgccgactaccgctttcgatatattgactcaattttccagcctggttaaaaatagcgaccagctcagtcgcaaatatagtgactaccctaactaagcaacaataaggaatacactatgactgttcaaacaagtaaaaatccgcaggtcgatattgctgaagataatgcattcttccctagtgaatatagccttagccaatataccagtcctgtctctgatcttgatggcgtggactatccaaaaccttatcgcggtaaacataaaattctggtgatcgccgcggacgaacgttatttgccgaccgataacggaaaactgttcagcaccggtaaccatccgattgaaacgttgctgccgttgtatcatctccatgctgcaggtttcgaattcgaagtggcgaccatttccggtctgatgaccaagtttgaatactgggctatgccgcacaaagatgaaaaagtaatgccattctttgagcagcataaaagcttgttccgcaatccgaagaaactcgcggatgttgttgccagcctcaacgctgatagcgaatatgcagcaatctttgttcctggtggtcatggcgcacttattggtttacctgaaagccaggacgtggctgccgctttacagtgggcaatcaaaaatgaccgttttgttatctccctttgccacggcccggcggcttttctggcgcttcgccacggcgataacccactgaatggttattccatttgcgcattcccagacgccgcagacaaacaaacgccagagattggctatatgccgggtcatctcacctggtacttcggcgaagaactgaagaaaatgggcatgaatatcattaatgacgacatcaccgggcgagtacataaggaccgtaaacttctcaccggcgacagtccttttgcagcgaatgcgttgggtaaactggcggcgcaggaaatgctggcagcttacgcgggttaatccctgttacgtttgaatgtaagcgcataatcaatcgcggccgcgttagtactcacgacgtggctgcgttttttcacggttaatttatggcgtactgaagccctatgttaatttctttgcggtaacgtaatccggaacacattatgcttattgagatagtgatacgtagcacttcccccatgcaattcggcaatcgctttgactaaagaaaggcctagtccctgacctacggaatgacggctattatctccccgccaaaatctacggaagagtttttcaggctcattaattttcgttccagggctggcgatatcaatattaagatagctgttggtatcaagaaaactggttatatgaatacggcttttttctgggctatatctaatggcattaacaataagattgcttaacattcgttgtagtaaaattttatccgcaaagatttgctgattgcactcgaccttaaagcaaatctctttctcgtcactaaggtattcaagatagtccaacaaattttcgacttccttattgagagaaaggctgtccagtttcaccaaaacattgtttttatctgccctggcaagaaacagtatgttctctgttaaccggctaatattttccagctcttcaatgtttccggcaattgttttttgatattcagcgatacttctggtttgactgagcgtaacctgattctgacccagtaatgcattaattggcgttctaagttcatgagcgagatcgtcagcaaactgacttagacgctcaaaatctttgactaaagcatgatgcattttattcaacgcctgcccaagaggttttagttctctcggtaatgcgctaacctcaacaggctctcggctatcgttataattcagcgcttccgttacaccactcaactttttgatctctcgtaatcccgttctgattaacagcggacttaatacactgcaaagtacaatggcgacaatgcaaattataatgctattaattttatactgttcaagcatgttatgtctggcactagccaatttagccacagtaaccgttaaacttgggctaacttcatcaatattaattcgtaaagcatctatctctgtatcattaataatgcttctgtaaatgccagctgcgctgattgtctcactagcaggtatgttatttaacatgccatcactgacatttgtccggttaacaattttattgatgctatcaccatgaataatcaagatatcctgactaacatccatcatccggttaaagtacacaggtaacgtatctggatttaccccatcaattaacaactgcttgatctgcgctgtccggttaatgagtgttgtatcatcgcgccatttcaactcacttgccaggccattatagagagtccagacaattccggcgccagcaacagacagtagcaatataaaaagcaaggttaaacggacggttatagatagtcttttcattatttttttaccgctacgaaactatagcccatcccccggattgtggcaattagcttttcaggaaaaggatcatcaacttttgcgcggagcctgcgaatggcgacgtccaccgtattggtatcactatcaaagttgattccccaaatttcactcgcaataaccgttctgggtataatttcgccagctctggaggccagtagccaaagtaactgaaactccttgcgcgtcagtgtaatactgatattgtccctgctcacactatgactaacagagtccattcttaagccgctgatttctaatgtactattcaaagcgtgatgttgccttaattgtgcccgaacccttgccagcaactcagaaaaactaaaaggttttaccagataatcatttgccccactgtccagccctctgactctgtcatcgacagaatcccttgcagtaaggcaaataacaggggtttgctttgctgttcttaacgtttgtaagatctgccagccatccatacccggaagcataatatccagaatgatcaatgcataatcatccttcagcgcaagataaagcccatctctgccatcagaaacggcatcgatgacataacccgcttcggaaagcccctgcgttacccattcctgggtcctttgattatcttcaataagtagaatcttcatgaaaataatatgccataaatcatatgttatagaaacagcctggttcattacaaaattgtaatgctgctgtaaggttaccctggacgctttttcgctatcctcaaaactcattcacatgacaaggatataaacatgttaaagcgttatttagtactcagcgtagcaacggcagcatttagtttaccttctttggttaatgccgcacaacaaaacattcttagcgtgcacattttgaaccagcaaacaggaaaacccgctgctgacgtgacagtcactcttgaaaagaaggcggataacggctggttacaacttaataccgccaaaacagataaggatggacgaattaaggcactgtggcccgagcaaactgcaactacgggcgattaccgtgtcgtatttaaaaccggggactatttcaagaaacaaaatcttgaaagtttcttccctgagatccccgttgaatttcatattaataaagtgaacgagcattatcatgtgcctttattacttagccaatatgggtatagtacctatcgtggcagttaatgcataaatatgtaaaagcagatctctgctactgttagggaggacactccctgacagattaacagtaaacggctcttgctggctaacgacaaaaaagtgtgatggcttatgaaaaagaatcaatttttaaaagaaagtgatgttacggccgagagcgtattctttatgaagcgtcggcaggtgttaaaagcactgggcatcagtgcaactgcactttctttgcctcacgctgcgcatgccgatctgcttagctggtttaaagggaacgatcgcccgcccgcccccgccggaaaagcgctggagttcagcaagcctgccgcctggcaaaataacctgccactgacgccagcagataaagtttccggttataataacttctatgaattcgggctggataaagccgatcccgccgctaatgctggtagcctgaaaaccgatccatggacactgaaaatcagcggcgaagtggcaaaaccattgaccctcgatcatgatgacttaacccgtcgcttcccgctggaagagcgtatttatcgtatgcgctgcgtggaagcgtggagcatggtggtgccgtggattggttttccgctgcacaaattgctggcgcttgccgaacctaccagcaatgcgaagtatgtcgctttcgaaacaatttatgcaccggaacagatgccaggccagcaggaccgctttatcggcggtgggctgaaatatccttatgtcgaaggattgcgtctcgacgaagcaatgcatccgctcacactgatgaccgtaggtgtttatggcaaggcgttaccgccacaaaatggcgcgccggtgcgactgattgtgccgtggaaatatggctttaaagggattaaaagcatagtcagtattaagctgacccgcgagcgtccgccaaccacctggaatctggcagcgcctgacgaatacggtttttacgccaacgttaatccgtatgttgatcacccgcgctggagtcaggctaccgaacgatttattggtagtggcggcatcctcgatgtacagcgccagccaacgctactgtttaatggttacgccgcccaggtggcaagcctgtatcgtggcctggatttgcgggagaatttctaaatgcgtctgacagcaaaacaggtgacatggctgaaagtttgcctgcatcttgccggattgttgccgtttctctggctggtctgggcgatcaatcacggtggactgggtgccgatccggtgaaagatattcagcattttactggtcgcactgcactgaaatttttgctggcgaccttgttaatcacccctctggcacgctacgcaaaacagccgttattgatacgcactcgccgcctgttaggattatggtgctttgcctgggcgacactgcatttaacaagttacgcattgctggagctgggcgtgaataatctggcgttattaggtaaggagttaattacccggccttatttaacgttaggtattatcagctgggtaattttgcttgctttagcgttcactagtacccaggcgatgcagcgaaaactcggcaagcactggcaacagttgcataatttcgtctatcttgtcgcgattctggccccaatacattatctgtggtccgtgaagattattagtccgcagccgctcatctacgctgggctggctgtactgcttttagccttacggtataagaagttgcgttccctttttaaccggttacgcaagcaggttcacaacaaattatctgtataacttcatattgccgacaaagtacgcgttatccctgccggatgtggcgcgagcgccctatccggcatacacagatcgcatcaggttatgtttcgtttgtcatcaacctcaaatcaccaaaataatttattttatttcaataagatagataagtagaactgagaaagccatgctctcgtttcctaagagttgttgcattttgctatatgttacaatataacattacacatcatatacattaactctggaggaaactgttttggcgattcgtctttacaaactggctgttgctttaggtgtctttattgttagcgctcctgcctttagccatggtcatcacagtcacggcaaacccttaacagaggtcgaacaaaaagctgctaatggtgtttttgatgatgccaatgtacaaaaccgaacgctcagtgactgggatggagtctggcaatccgtttatcctttactgcaaagtggcaaacttgaccccgtctttcagaagaaagcggatgcagataaaactaaaacatttgctgaaattaaagattattatcacaaaggttatgcaacagatatcgagatgattggcattgaggacggcattgttgaattccatagaaataatgaaacaacaagctgtaaatatgattacgatggatacaaaatactcacctataaaagtggcaagaaaggcgttcgttacttattcgaatgtaaagatcctgaaagcaaagcccctaaatatatacaatttagcgatcatataattgcaccacgaaaaagttctcattttcacatttttatgggtaatgatagtcagcaatctttattaaatgaaatggaaaactggccaacgtattatccatatcagttgagtagcgaagaagtggtcgaggaaatgatgtctcattgagtattctcatgataacgcctcgatgccgctttagtaagttatcataactgccactggtccatccacaaacgccactgaacgcaagctagctacagacacgctcatcactatgacgtgtctgtatattaataagctaacccgcattgagttaaccaataacggattccatacacaatacggccaacagagaaagatacctgtgctcacgccattgcttatattggctggttacaatatgcactatcaattttttaaataacaaattattaaaaccacatctgtataaggaatttttaaggttcgtgggatagcttgactgtgaaaatcacaggagctacaaaaatgaaccgattcagtaaaactcaaatttatttacattggataacgctgcttttcgttgcaataacctatgccgcgatggaactccgtggctggtttcctaaaggtagtagtacttatctgctgatgcgagaaacacattacaatgcgggtatattcgtttgggtgttaatgtttagtcgcctgattataaaacaccgttatagtgatccttctattgtgccaccgccacctgcctggcaaatgaaagcggctagcctaatgcacatcatgctttatataaccttccttgcacttcctctgctggggattgctttgatggcttacagtggaaaaagctggagtttccttggtttcaatgtgtctccctttgttaccccaaacagcgaaattaaagcactgataaaaaatattcacgaaacctgggcaaatataggctactttttaatcgcagctcacgctggcgcagcactctttcatcactacattcagaaagataatactctgttacgaatgatgcctcgccgcaaataagtcgatccccttacaaggaaatgtgaaccatggacatcaacgcgtcataaatgtttacgcaagtgcacaatgcaccctttccactatcaacaaggaggagcagaaactgtgtaaatcgtacaatggtaagacttatcaaaaatacaggttaattttggtatttaaaccttttttacttgttagtatgatacaaaggctttcaaaaaagctgcgaaattcaacaactcttggaaattatggactttgtcccgcggctttaatctgacggccgcgttccttttttgactcaattattgaacccttctctacgcaacttcagttcccaccaccaactttgcggcagtttcataggatgaatgtctaaaagaataatggtgagcgataagaaaacgactgaataactgcacattttcgctcgaaagcttcctgtcagatccatagcgaatcaagtgctgaatgtcacagtatcgaacagaaaacagtgacgatctaacccttcaagaatattctacgattgttctgtttaggaaaagcaaggcgggaagtcgggagataagtcattgataaagtggcggagagagggggatttgaacccccggtagagttgcccctactccggttttcgagaccggtccgttcagccgctccggcatctctccgttcagatggttgccatgatgccaggaaatttggcattttaacagtccctgtccgtgcaattttgttcaagtgacgagtttgcgagcaaaacgatgattaagtggccctggaaagtacaagaaagtgcacatcaaactgcccttccctggcaggaagcactaagcatcccccttttaacgtgtctgacggaacaggaacaaagcaaattagtcactcttgccgaacgttttttacagcaaaagcggcttgttcctttacagggctttgaactggatagtttaagaagctgccggatagcacttctattttgcctacccgttctggagttaggactggaatggctggatggttttcatgaagtcttaatttatcctgcgccatttgtggtcgatgatgaatgggaagacgatatcggtctggtgcataaccaacgtattgttcagagtggtcagagctggcagcaagggcctatcgttttgaactggttggatatacaagattcttttgatgcttctggttttaacctgattattcatgaagtcgctcataagctggacacccgtaacggcgatcgcgccagcggagttccctttattccgttgcgtgaggttgctggctgggaacacgatcttcatgctgcaatgaacaacattcaggaagaaatcgaattggttggcgagaatgcggcgagcattgatgcttatgcagccagcgatcctgctgaatgttttgccgtactttctgaatatttctttagcgccccagaactttttgctcctcgtttccctagtttgtggcaacgtttctgccaattttatcaacaagatcctttgcagagactgcatcacgctaatgatacagacagctttagcgcgacgaatgttcattaattaacaactttgcagattaattaaccaattgaaatgacttatgaaatttagtgttgacagacaaggtaccgctaagtaatattcgccccgttcacacgattcctctgtagttcagtcggtagaacggcggactgttaatccgtatgtcactggttcgagtccagtcagaggagccaaattctaaaaattcgcttttttagcgcaatgtcactgaccttagttgaacattgttttttaacggatagcgggtttttaacatcttaagcgccctcgacctttatggttgagggcgttttgctatgaacgccatcaccattttcccctcgattataaaacttgagttattcagtagtctcccctcttgcaactcacacccaaaactgcctaacgaaaagttattaattttcaatcatattgctatcagtatttacattttttcgctgtgctagaaagggcgcatttatgttagctcgtagtgggaaggtaagcatggctacgaagaagagaagtggagaagaaataaatgaccgacaaatattatgcgggatgggaattaaactacgccgcttaactgcgggtatctgtctgataactcaacttgcgttccctatggctgcggcagcacaaggtgtggtaaacgccgcaacccaacaaccagttcctgcacaaattgccattgcaaatgccaatacggtgccctacacccttggagcgttggaaagcgcccaaagcgttgccgaacgtttcggtattagcgtggctgagttacgcaaactcaaccagtttcgtacgtttgctcgaggttttgataatgtccgccagggtgatgaactggatgtcccggcacaagttagtgaaaaaaaattaaccccgccgccgggtaatagcagtgacaacctcgagcaacagatagccagtactagtcagcaaatcgggtctctgctcgccgaagatatgaacagcgagcaagcggcaaatatggcgcgtggatgggcctcttctcaggctagtggcgcaatgacagactggttaagccgcttcggtaccgcaagaatcacgctgggcgtggatgaagattttagcctgaagaactcccagttcgattttctccatccgtggtatgaaacgcctgataatctctttttcagtcagcatactctccatcgtactgacgagcgtacgcagattaacaacggcttaggttggcgtcatttcactcccacatggatgagcggcatcaacttctttttcgaccacgatcttagccgttaccactcccgcgccggcattggcgcggagtactggcgcgactatctaaaattaagcagtaacggctatttgcgactgaccaactggcgcagcgcacctgaactggacaacgattatgaagcacgcccggccaatggctgggatgtacgcgcagaaagctggctacccgcctggccgcaccttggcggtaaactggtctatgaacagtattatggcgatgaagtggccctgttcgataaagacgatcggcaaagtaatcctcatgccataaccgctggacttaactatacccccttcccgctgatgaccttcagcgcggagcaacgccagggtaaacagggcgaaaatgacacccgttttgccgtcgattttacctggcaacctggcagcgcaatgcagaaacagcttgacccgaatgaagtcgctgcacggcgtagccttgcaggcagccgttatgatctggtggatcgcaacaacaatatcgttctggaatatcgcaaaaaagaactggttcgcctgaccctgacagaccccgtgacagggaagagtggagaagtgaaaagtctggttagcagcctacaaaccaaatatgccctgaaaggctataacgtcgaagccaccgcactggaagctgccggtggcaaagtggtcacaacgggtaaagatattctggttaccctgccggcttaccggttcaccagtacgccagaaaccgataacacctggccgattgaagtcaccgccgaagatgtcaaaggcaatttgagcaatcgtgaacagagcatggtggtcgttcaggcacctacgctaagccagaaagattccagcgtaagcttaagtacccaaacattgaacgcggattcccatagtaccgccacactgacttttattgcgcatgatgcagcaggtaatcctgttgtcgggctggtgctcagcacgcgtcacgaaggtgttcaggacatcaccctttctgactggaaagataatggtgacggaagctatacccagatcctgaccacaggagcgatgtctggcacgctgacgctgatgccacagctgaatggtgtggatgcggctaaagcccccgccgtggtgaatatcatttctgttagcagttcccgaactcacagcagtattaagattgataaggaccgttatctctccggcaatcctatcgaggtgacggtagaactgagagatgaaaatgacaaacctgttaaggaacaaaaacagcaactgaataacgcagtcagcatcgacaacgtgaaaccaggagtcactacagactggaaagaaaccgcagatggcgtctataaggcgacctataccgcctataccaaaggcagtggacttactgcgaagctattaatgcaaaactggaatgaagatttgcataccgctggatttatcatcgacgccaacccgcagagtgcgaaaattgcgacattatctgccagcaataatggtgtgctcgccaatgagaatgcagcaaacaccgtcagcgtcaatgtcgctgatgaaggaagcaacccaatcaatgatcataccgtcacgtttgcggtattaagcggaagcgcaacttccttcaacaatcaaaacaccgcaaaaacggatgttaatggtctggcgacttttgatctgaaaagtagtaagcaggaagacaacacggttgaagtcacccttgaaaatggcgtgaaacaaacgttaatcgtcagttttgtcggcgacagcagtactgcgcaggttgatctgcagaagagcaaaaatgaagtggttgctgacggcaatgacagcgtcacaatgaccgcgaccgtccgggatgcaaaaggcaacctgctcaatgacgtcatggtcactttcaatgttaatagtgcagaggcgaaactgagccaaaccgaagtgaatagccacgacgggatcgccacagctacgctgaccagtttgaaaaatggtgattatagggttacggcctctgtgagctctggttcccaggctaatcaacaggtgaattttatcggtgatcaaagtactgctgccctgaccctcagtgtgcctagtggtgatatcaccgtcaccaacacagctccgcaatatatgactgcaaccttgcaggataaaaatggcaacccactaaaagataaagaaatcaccttctctgtgccaaacgacgtcgcaagtaagttcagcattagcaacggaggaaaaggcatgacggatagtaacggggttgcaatcgcctccctgaccggcacgttagcgggcacgcatatgatcatggctcgtctggctaacagcaatgtcagcgatgcacagccaatgacgtttgtggcggataaagacagagcggttgtcgttttgcaaacaagcaaagcggaaatcattgggaatggcgtggatgagacaactctgacagcaacagtgaaagatccgagcaatcatccggtggcggggataacggtaaacttcaccatgccacaggacgttgcggcaaactttacccttgaaaataacggtattgccatcactcaggccaatggggaagcgcatgtcacgctgaaaggtaaaaaagcgggcacgcatacggttaccgcaacgctgggtaataacaataccagtgatagccagccggtaacatttgtggcggacaaagccagcgctcaggttgtcctgcagataagtaaagatgagatcacaggtaatggcgtcgatagcgcaacgctaactgcaacggttaaagatcagttcgacaatgaggtgaataatcttccggtaacattcagcagtgcctctagtggactcaccctgaccccgggagtaagtaataccaacgagtctggcatcgcgcaggccactctcgcaggcgttgcctttggtgagaagacggttactgcaagtctggctaataatggtgccagcgacaacaaaactgtgcattttattggcgacacagcggcggcaaaaattatcgagttggcgcctgtcccagacagcataatcgccggtaccccgcagaacagctccggcagcgtcatcaccgccacagtcgttgataataatggctttccggtgaaaggtgtgactgtgaacttcaccagcaacgcagcgacagccgaaatgacgaacggcggtcaagccgtgacgaacgaacagggtaaggctaccgtcacttataccaatacccgctccagcatagaaagtggagcgagaccggataccgttgaggccagtctggaaaatggtagctccacgcttagcacaagtattaatgtcaacgctgatgcgtctacggcacatctcaccttgctacaggcactttttgatacagtctccgcaggcgagacaaccagtctgtatattgaggtgaaggataattacggcaacggtgtcccccagcaggaggtaaccctcagcgttagtccaagtgaaggcgtgacccccagtaataacgctatatatactaccaaccacgacggcaatttttacgcaagctttaccgctacaaaagccggggtttatcaattgacggcaaccctcgaaaatggcgatagcatgcaacaaacagtgacctatgtgccgaacgtcgcgaatgctgaaatcacgctggcagccagcaaggatccggtgattgccgacaataacgatctcacgacactaacagcaacagtcgctgatacagagggcaatgcgatagccaacactgaggtaacatttactctgccggaagatgtgaaggcgaacttcacgctgagcgatggcggtaaagtgattactgatgctgaaggcaaagcgaaagtcacgctgaaaggtacaaaagcaggcgctcatactgttacagcaagcatgactggcggtaagagtgagcagttggtggtgaactttattgcggatacgctcactgcgcaggttaatcttaacgttaccgaggacaattttatcgctaataacgtcgggatgaccaggctgcaggcaacagtgactgatggaaacggcaacccgttagccaatgaggcggtgacattcacgctaccggcagatgtgagcgcaagctttactctcggacaaggcggttccgccattactgatatcaacggcaaggctgaagttacactgagcggtacaaaatccggcacctaccccgtgacagttagcgtgaacaattatggtgtcagtgatacgaaacaggtgactttgattgccgatgctggtaccgcaaaactagcctccttaacctctgtatacagtttcgtcgtcagcacgaccgagggcgcaaccatgacggcaagcgtcactgacgctaacggcaacccggtagaaggcataaaagttaatttccgcggaacctccgtcacgctaagcagcaccagcgttgaaacggatgatcggggtttcgctgaaattcttgtgacaagcaccgaggtcggactgaaaacagttagtgcctctctggcagataaacctactgaagtcatcagccgattactgaatgccagtgcagatgttaattctgcgacgattaccagtctggagataccggaaggtcaggtaatggtcgcacaagacgtagcagttaaagctcacgttaacgaccagtttggcaacccggttgcgcatcaacccgtgacattcagtgcagagccatccagccaaatgatcatcagccagaatacggtctctactaatacgcagggtgtagccgaggtcaccatgacgcccgaaagaaacggtagctatatggtgaaagcatccctgccgaatggagccagtcttgagaaacaactggaggctattgatgaaaaactgacactcacggcgtccagtccgcttatcggtgtctatgcccctacaggcgctactctgacggcaacgctaacctctgcaaatggcactccagtggagggtcaggtcatcaactttagcgtaacgccagaaggggcgacgttaagtggcggaaaagtgagaactaactctagtggtcaggctccagtcgttttgaccagcaataaagtcggtacatatacggtgactgcatctttccataacggcgtaacaatacagacacagacaaccgtgaaagtcactggcaacagtagcaccgcccatgttgctagctttatcgctgatccaagcactatcgccgccaccaacactgatttaagtaccttaaaggcaacggttgaggatggcagtggtaacctgatcgaaggtctcactgtgtacttcgccttaaaaagcggctctgccacattaacgagtttaacagcggtgaccgatcaaaacggaatcgcgacaacaagcgtgaaaggagcgatgacaggtagcgtcacggtaagcgcagtcacgaccgctggtggaatgcaaacagtagatataacgctggtggctggcccggcagacaccagccagtccgtccttaagagcaatcggagtagtctgaaaggggactataccgatagtgctgaattacgtcttgttctgcacgatataagtggcaatccgatcaaagtttctgaagggatggaatttgtgcaaagtggtactaacgtgccctatataaaaattagcgcaattgattacagtctaaatatcaacggtgattacaaagccactgttacaggaggcggagagggtatcgcaacgctgatccctgtattgaatggtgttcatcaagctggtctgagtaccacaatacaattcactcgcgcagaagacaaaataatgagcggtacagtaagtgtcaatggtactgacctaccgacaactacattccctagccaggggttcaccggggcgtattatcagttgaataatgacaactttgccccaggaaaaacggcggctgattatgagtttagtagctctgcctcctgggtcgatgttgatgctaccggtaaagtgacatttaaaaatgtcggcagcaatagcgaaaggattacggcgacgccaaaaagtggaggccctagctatgtatacgaaatccgtgtgaagagttggtgggtgaacgccggcgaggctttcatgatatacagccttgctgaaaatttttgcagcagcaatggctacacgctccccagagcaaactatttaaaccactgtagttcccgaggcatcgggagtctgtacagtgaatggggagatatggggcattacacgactgacgctggttttcaaagtaatatgtattggagttctagtcccgcaaacagtagcgaacaatacgtagtttccctggcaacaggtgatcaaagcgtatttgaaaagcttgggtttgcttatgcgacatgttataaaaacctgtgattttccgttataatttcttaaagagtgttccattcggggcactcttttttacattccctctacagaactagcccttctctcacagaaaatgaataaataaaaatgcggcaccgccagaatcgcgttcgatgtgactatgatcattttcggtgagtactgctttgatctaaaggctggttttctgtgatgattgaccagcctcagagtattgatgacaccaccgttcataacagatcggcattactatgcataagtactgtctcatattctcgccaaaacactttttaatgcctttgcgaattcatccagacttatattgtcaattttttgcccaacgacgactgactccgagacatcggccattgcgggccatcgcgttttgtaatcagcataaattgcaacaacaggggtattataggcacttgccatatgtaatattgaggtgtcaggagttattgcgatataagcatcttttatgattgctgctgaacgtttaatcgagggtggtaaggataaacggtagacattattataacaatccactaatgccctggctttatcttcacctttgggtccatgaacgatcactattggtatatctgtttcactttaaatttttgctattagattttctgcaatcgataatgaaaatgtacgttcctgcgagctaccttctaaattgaacgcaatgtaagatcctaacgatcgcatttcctcgcgcacctcatcgagtacatcctcacttagtggcaattcatatattggcctgactgctggaaaacccgcctcacgcatcataaatgcccatgtcataggtacgggagcccggagtttctgatccatactggacgcgttcttgcacaaaggggagaagcaattcatggttataccaacaacctgaaaattcgtttttgctttcaactgactgataaataacatcgttttcaggttctttttacgcatcccctcaatgcaaagatccggcgtaccgtattgctgtgttatgttctttgctaaatcttttatttcttttaatgttgcgtgatcctgcatagtcattgtgactaatgttaatttagtctgttcaagtttaagcgcattaaagacttctaaattaattgtcgacgttacaattaaaagatgcttaattttatgcaattcaagcgcccgaataacaggaaagatggccatagcatcgccaatctgatcgggaatatggatgacaacaaagtctgttttttcaatattgaaattataagctttataatcgtagtaactaaatgcaatacgtctcaacaatgatgctaaaaacatacctaacctcgcctccctactggttataatgcaatgcagtctatcagactcatcagggtgccattttgtgcatatgcggacttttatgtttcatatctctaacctgtgggtcctctgcttaatccttaaacaacaccagcaactcctgcgctttcatcttccatcgaatttttcatgttgccgctaatcagccataaaatcatttgcagatgcgctctgtcgaggtagtctcataaggttcgtttatagatcgacggcaatgtgagttaccttttccatactaattataaaaagacagtacaaacaggatcattatggactccacgctcatctccactcgtcccgatgaagggacgcttagcttaagtcgcgcccgacgagctgcgttaggcagcttcgctggtgccgtcgtcgactggtatgattttttactctatggcatcaccgccgcactggtgtttaatcgcgagtttttcccgcaagtaagcccggcgatgggaacgctcgccgcatttgctacctttggcgtcggatttcttttccgtccgctcggcggtgtcattttcggtcactttggcgaccgactgggacgtaagcgcatgttaatgctgaccgtctggatgatgggcatcgcgacagccttgattggtattcttcctagtttcagcaccattgggtggtgggcacctattttgctggtgacactgcgtgccattcagggatttgcagtcggcggcgaatggggaggcgcggcgttgctttccgttgaaagtgcaccgaaaaataaaaaagccttttacagtagcggtgtacaagttggctacggtgtaggtttactgcttagtaccggactggttagtttgatcagtatgatgacgactgacgaacagtttttaagctggggctggcgcattcctttcctgtttagcatcgtactggtactgggagcattgtgggtgcgcaatggcatggaggagtccgcggaatttgaacaacagcaacattatcaagctgccgcgaaaaaacgcatcccggttatcgaagcgctgttacgacatcccggtgctttcctgaagattattgcgctacgactgtgcgaattgctgacgatgtacatcgttactgcctttgcacttaattatagtacccagaatatggggctaccgcgcgaacttttccttaatattggtttgctggtaggtggattaagctgcctgacaattccctgttttgcctggcttgccgatcgttttggtcgccgtagggtttatatcacaggtacgttaatcggaacgttgagcgcatttcctttctttatggcgcttgaagcacaatctattttctggatagttttcttctccataatgctggcaaacattgcgcatgacatggtggtgtgtgtgcaacaaccgatgtttaccgaaatgtttggtgccagttatcgctatagtggcgctggagtcggttatcaggttgccagtgtggttggcggtggatttacaccttttattgccgctgcactcatcacttactttgccgggaactggcatagcgtcgccatttatttgctggctggatgcctgatttccgcaatgaccgctttgttgatgaaagacagtcaacgcgcttgatagcctggcgaagatcatccgatcttcgccttacacttttgtttcacatttctgtgacatactatcggatgtgcggtaattgtatggaacaggagacacacatgaataataagggctccggtctgaccccagctcaggcactggataaactcgacgcgctgtatgagcaatctgtagtcgcattacgcaacgccattggcaactatattacaagtggcgaattacctgatgaaaacgcccgcaaacaaggtctttttgtctatccaagtctgaccgtaacctgggacggtagcacaaccaatccccccaaaacgcgcgcatttggtcgctttacccacgcaggcagctacaccaccacgattactcgccctactctctttcgtagctatcttaatgaacaacttacgttgctgtatcaggattatggtgcgcatatcagtgtgcaacccagccagcatgaaatcccttatccttatgtcatcgatggctctgaattgacacttgatcgcagtatgagcgctgggttaactcgctacttcccgacaacagaactggcgcaaattggcgatgaaactgcagacggcatttatcatccaactgaattctccccgctaagccattttgatgcgcgccgcgtcgatttttccctcgcacggttgcgccattataccggtacgccagttgaacattttcagccgttcgtcttgtttaccaactacacacgttatgtggatgaattcgttcgttggggatgcagccagatcctcgatcctgatagtccctacattgccctttcttgtgctggcgggaactggatcaccgccgaaaccgaagcgccagaagaagccatttccgaccttgcatggaaaaaacatcagatgccagcatggcatttaattaccgccgatggtcagggtattactctggtgaatattggcgtgggaccgagtaatgctaaaaccatctgcgatcatctggcagtgctacgcccggatgtctggttgatgattggtcactgtggcggattacgtgaaagtcaggccattggcgattatgtacttgcacacgcttatttacgcgatgaccacgttcttgatgcggttctgccgcccgatattcctattccgagcattgctgaagtgcaacgtgcgctttatgacgccaccaagctggtgagcggcaggcccggtgaggaagtcaaacagcggctacgtactggtactgtggtaaccacagatgacaggaactgggaattacgttacagtgcttctgcacttcgttttaacttaagccgggccgtagcaattgatatggaaagtgcaaccattgccgcgcaaggatatcgtttccgcgtgccatacgggacactactgtgtgttagtgataaaccgttgcatggcgagattaaacttcccggccaggctaaccgtttttatgaaggcgctatttccgaacatctgcaaattggcattcgggcgatcgatttgctgcgcgcagaaggcgaccgactgcatagccgtaaattacgaacctttaatgagccgccgttccgataataagttctgaaccttcttatcagaaatagatgtgaaggagtaagtaagacacctggcaaatagcctgcaataatcgtgggctgtttgcttccttgggcggatacgagttttattatcgtcttaatgatttccacatattaaaagcaagtatgctttcaaaacacaattataaaaaatcccgccaacaatataagtttttataaaattaaatataagattatggctttagaatatttttatttctaatagacgagatttttcctgttatgatataatatgctgaattaacacatgttaacgatttaccagtaatgtaaataaattttcgaggagatcattccagtgggacgtaaatgggccaatattgttgctaaaaaaacggctaaagacggtgcaacgtctaaaatttatgcaaaattcggtgtagaaatctatgctgctgctaaacaaggtgaacccgatccagaattaaacacatctttaaaattcgttattgaacgtgcaaagcaggcacaagttccaaagcacgttattgataaagcaattgataaagccaaaggcggcggagatgaaacgttcgtgcagggacgttatgaaggctttggtcctaatggcagtatgattatcgccgagacattgactagtaatgttaaccgtacgattgctaacgttcgcacaattttcaataaaaaaggcggcaatatcggagcggcaggttctgtcagctatatgtttgacaatacgggtgtgattgtatttaaagggacagaccctgaccatatttttgaaattttacttgaagctgaagttgatgttcgtgatgtgactgaagaagaaggtaacattgttatttatactgaacctactgaccttcataaaggaatcgcggctctaaaagcagctggaatcactgagttcagtacaacagaattagaaatgattgctcaatctgaagttgagctttccccagaagatttagaaatctttgaagggcttgttgatgcccttgaagatgacgacgatgtacaaaaagtttatcataacgtcgcaaatctctaattatcttttaaagaaatctgtctttacggcagatttctttaatctcatataattcttataaaaaatataatattcaactcgtcatattgattatacccccccgttcccagagaaataatatttattaaaattccagttcttctttttctgattacagaaggcaaagtggcaattacgcatagtttcccgataaagacgcgatagcgacatcccgcataaggcatttttctctttatctttgtacggtacttcatggaacagagtttttgaccttgcgaatcgtgatgtctgttggggagggacaatttgctcactgaagcgtgagactcgattaagcgcacgaaacacagaaatcaaaaaacccggtcacttttttacaaggtaaccgggtaaaaataatttttattttttaactgttttgagactcatagagatgtctcaaaactaaaatttggctcctctgactggactcgaaccagtgacatacggattaacagtccgccgttctaccgactgaactacagaggaatcgtgagaacgaggcgaatattagcgatgcccacccacaatgtcaaagcctgttttttaaatttgaaatcgtttgctgaaataatctgcattttgtcgtttattcgctcacaactggctttttttcacacttttgcggctcgggtcgagggtatttccatagccaacgtccagtaaccattcgccagtaaaacagcacggcccgcacagcccagtcggcaaacattcccatccagacaccaaccacaccccagccaagcatgattcccagcacataaccgactacaacccgacaaccccacatgctcaacatgctaacccacatggcgtaacgggcatcacgagcacctttaaatccagcgggtagcacccaactggcggaccaaataggcataaataaagcatttagccaaatcagaatcacaacgacatgtttaacctgtggatcctgggtgtaaaagcttgccataaccccggcaaagggagccgttagccaggcgatggccgttaatccaagagtggaaagccagaacacatgccgcaactgaatctctgcttgcgctatctgccctacccccaaccttcggcctgtaatgatcgtagaagcagagccgagcgcacttccgggtaagttgataagagccgcaatactaaacgcgataaaatttccggcaataacactggtccccatcccggcaacgaacatttgggttaataaccgaccactggtaaataacacactttcgacactcgcgggaataccaatccccatgacttcccagataatgctaaaattcagcggtttaaaatagctctttaagctaatccttagcgcaggattaaaaccaatcgccagcacccacaaaattgcaactgcgccaatataacgagaaatggttaaacccagccctgccccgacaaatcccagtcccggccaggagaaaaggccgtaaatcaatatgccgctaataataatattaagaatattcaggctaccgttaatcaatagcggtattttcgtattccctgcaccacgaagtgccccgctaccaataagagtgatggcagctgctggataactgagtaccgtcagctccagataagtcaacgccagtgctttaacttctgtcgtggcatcacccgcgacgaaatcaataatttgttcgccaaaatgatgaataagcgttgccaacagtacggcaaacaacgtcatgatcaccaaactctgccgcgtcgccaccctcgctcgtcgtcgatcccgcttaccgagactaaatgccacaacgacagtagtaccaagatcgatagcagcaaaaaaagccataatgaccatattgaagctgtccgccaatcccacgccggccatcgcatcttttcccagccagctgaccagaaaagtgctcagaacccccatcaacaggacacaggcattctccatgaagataggaacagcaagcggggttatctcgcgccagaacaacactttgtagctcttgcgtttagcgtgccagcgagtgccgtgaacaacctggcgtaaagcagaggagatattcaaagcgctccttaattgcagaaagtgaaaccacatttcaaataaactgggagaatcagcaaagctgcaaagattttcgccaacaaattgtctgcaaatgcaacaaactgtacttagaaacggcaaacagttggggaatttaaaaatcgggttactcaaaagatttttcgccgttaagatgtgcctcaacaacgattcctctgtagttcagtcggtagaacggcggactgttaatccgtatgtcactggttcgagtccagtcagaggagccaaattcctgaaaagcccgcttttatagcgggatttttgttatatctgataatcaatttcctcttcactgctttccatcacctgccgcttgatatcctcaacactcagtcctgcattacaaagttccagaaagcgccagacatagttacgctgaagttgtcctcgcttcagtcccaaccagacagtattagcatcaaaaagatgccgcgtatccaggcggattaaattctcttcctcttgttcgccactggattgctcggcaactaatccgatcccaagcccaagagcaacataggttttaatgacatcagaatcctgcgcacttaatacaatatctgccagcaaacctttgcgggcaaatgcgtcatcaatacgactgcgccccgtaatcccctgtcggtaagtgattaacggccacttcgctatactttccagcgtcaatggactaatttgcgtcaagggatgatcgtgtggaacaagcaaactatggtgccaacgaaaccacgggaaggcgacgagctgcgggtcattactcaaacgctcgctggcgataccaatatcagcttcgccattttgcaacaatgtcgcaatttcctgtggcgtcccctggattagctcgagccgaacctccgggaaaagttcgcgaaaagctttaatgacctctggcaagctataacgtgcctgagtatgcgtcgttgcaatagtgagaacgccagacgtatcgttggtaaacaggtctgcaagccgacgaacattactggcttcattcagaatacgttctgcaatgaccagtaatgctttgcccggttcagtcatgcccagcagtcgcttacctcgtcgaacaaatatttcgatgccaagttcatcctccagttcccgaatatgacggctgacgccactctgactggtaaaaagcatattcgcaacctctgtcaggttgtaatcctgacgtgcagcctcgcggattatctttagttgttggaaattcacggtaaactccgggcagttcagatttcccgttattgttaaagtctaatgcccggcataacaaataataaaaacccgcatcttattccatcccgatataacacttagctcaccaattgccactgccttttttccatcactggagaactaatcacactcattaacaactctttcactgcctgtgcctgtgggcttaagttcgctctggcgggtaaatttaaactcaaagagagactcatggaaggagtggtaatgcgactcatccacccatttactgcgccacataagctacgcgcggcgctttcgggtaatactgcaacgcccatgccgctggcaatcgctgcggtaagcgtggcaatagactcaatttcaccaataacttttgccgtgagtcgccgtagggaaaaagcctcatcaacacgaagtctaatagcactgtaatcactggggagaaagaggttcatttgcgcaatagcattcacatcaacgctttgccccgggcaatcttgagttcctaccagaaaaagatcttctttcagcaaagcctgactggatacaccagccacaggggaatgctcataaatcaccgccatatcgagttggtgatttatcaatttttcgttaagcactgcaccactattttcatgaagatagataacgatctccggaaattcagcgcgaaccgcctgtaataagggcatggtgatggaactcgcagcggttcctggtgcaaagccaatgctgacttgcccgcttaatgcctgaccaacgttatgcaccgccagttgggcctgttcacactgacgtaaaatggcccgcgcatgggtatagagaatttttccggcgtctgttggtgtaacgccccgctttgtacggatcaaaagttgttgatttaactcaccttccagtgtggcaacctgctggctgagcgctggttgtgcgatatgcaatacttcagcagcctgggtcaggctaccaatatctacaatttttacgaagtatttcaggcgtctgaagttcatgttgcctccggtttttaagaatcggcccaagtgccgccattacttacaaccagattgcaagatgcttgccagttttattttggtgttgatgtacaagctaaccaactgtcaaataagagattatgatagattcgtcatttgctcctttaatcagctgtcgcgttcccctgccctataaaaggagggtatgcaccacgatggttcattacccaataagattgaaagctcaccactttgttgaaattgacagcaaacaaacaaaaaaatgcatttcaccctttgacatcaccatgcactgccattaatatgcgccccgttcacacgattcctctgtagttcagtcggtagaacggcggactgttaatccgtatgtcactggttcgagtccagtcagaggagccaaattcaaaaaagcctgctttctagcaggctttttgctttctaattaccaacgctcttaaaacatctgtctactaccagaactaatttgcacaggcattccgcttcgacgttgcaacgcagcatttgcgcgatttacatcaacttcttgcccgttgataaacgcccgcaaagatggggttaccggcaatggcacttttcggtcagactcatattctgcacgattgcggctcaatggctcatgaacttccagccagttgctgccatctggttcagtggtgtattttactggctggtcgataatttgcacacgcgtcccaacaggaacattatcaaacagatatttgatatcgtcattgcgcagacgaatacagccctgacttacccggagcccaataccaaaattggcattggtaccatggatggcatacaacctgccaatataaatcgcgtacagccccatgggattatcggggcccgcaggaacaaatgcgggcaaactctcccctcgtttcgcatattcgcgccgagtgttcggcgttggcgtccaggttggagcttcttgtttacgttcaacggtagtcacccagttacgcggggtttctcgcccagcctggccgataccaataggaaagacttccacagtattactgtctggtgggtagtaataaagacgcatctcagcgacgttaacaacaatccctttacgaacagtgtcgggcaaaatcagttgctgcggaatggtgagttggctgccagacttcggcaaaaaaacatcagcgcccgggttcgcttccagcatgttacttaacccttgcccgtattgtgcggcaaaagtctccagcggctgggtattgtgatcaggaacagttacagtaaagctctgccccactaaacggctaccctctggaggtaatggataagttaccgccaggctagtatggctggcaaaaagcagagcaaaactgcaaagaatatttacacgacgcatcatgtccctttcctatgtcgcgaaagctatccgttaagtatagcttttatcagacttttcgtttttaactgttcaaatcagaagtcgtattccccggtagaacaatattactggcagcaagttcgcccatgttgttgtatatcgcacaggcagcttcgatgatgggcatcgccagagctgcgccactcccctcacctaaacgcatctccatattgagataaggctccagccccaaatggctgagcgctatacgcgcgcctttttctgcgctcaggtgagaaggaatgagatacggtttgatcgcaggagacatctggcaggctgcgagcgcagcagcataagaaagaaatccatccagcaacacgggtaaaccgcaggaagcagcacctaacatcactccagctattccgaccaaatcaaatccacccacttttgccaggacatcaacaccatcctgaggatttggttgattcaacgtaatcgcccgacgcacaacatcaattttattagccagtttatctgtcggcaggtttgcgccaatcccaaccacttcttcaggatcccggccagtgattgtgctgactattgctgctgccggtgtcgtgtttgccatccccagttcacctacaccaaacagcgtgacaccgttttttgccagctcctgcgtataacatatgacgtccaaaagcaacttttcagcctgacggcgactcattgccggagcactagcaatattgccgctacctcgtgcgacacgcatgttgataagcccggggataggctcagcagtatcaataccaacatcaattacgtggacgttagcgcccgcttgttctgccagcacacacacgccggttgttccacgggtcatattttcagcctgtatggctgtcacttcttttggagaaatagcgaccccttcctcccagacgccgtgatcggcacacataaccagtaccgcttttttgcccacatgcggtatgccattcaaccccggcattcctgccagttgtatggcaagcacctccagctttcccaggctaccaacaggtttgagtaacccgtcaatatgccgttgtgcacggctcatagcggtagaatcgatggctgggatcgtattcagtaaatcggcaagtatttgcatctcacgtctctttatagcagtgccagcaggaagaccagttcaccaagctctatggctgctcccagcgtatcgcccgtttgcccgcccagcgtacgtttgagaagctgaccgaggatgaaaatcgccaccatcgtcaccaccatagcagccacaccatgcatacccggcaataatacggcagcaaaaatagcggctaagccgagtgtgacgcaggtttgtcgcccatcaattttgccaatgaacacattgccaagcccttcttcccgcgcataacgatgacgatacatcaataatgcggcagtcccgcggctgaccgcacatgctgccgccaggcttgcaaggatgctttcgccacgcagagccaactcgcttaacaccagaatctttgccagtaccacaaaaatcaatgccagaccgccgtgggtgcctaaacggctatcacgcatgatttccaacatgcgatcgcggctacgtgcagaaaatacgccatcacaggtatcagcgaggccgtccagatggaatcccccggtcatcagcaccagcacaagtacgctaaacagtgccgccagtggtgcgccacaccatgcctgcagcaccatgaagaccagcccgctaatcgcgccaagcaataatccaatcaaaggaaaagtaataataccgcgagaataatgctcgaaatccagtccctgggaccagcgacgcggtacaggcagacgcgtaataaaactgagcatcgcccaaaataatttactcatttgatttttactccaataccgctaaccaccagccatacttcatttgccgcagcggccaactgctgatttacccgcccggcaatatcacgaaaatgtcgtgccagacgactctccggcacaatccccattcccacttcgttagtcactaatacaacctttgcggggcaacgttggcaggcagcaatcaagctctgaatctcagcattaatcgcctgttccatcgcctgataatcccattcatcagggtctttatcgccgccataatcaaacaacagattagtcaccattgtggtaacgcattcaagcaacacaacctcattcgggttaatgtctgcatgaattaattcatcaagatgttgccagcgctccactgtgcgccagtgctccgggcggccttgccgatgatgttctatccgtgcagccatctcatcatcaaggatttggctggtagcgatatacagaacctgactagagtccccaataagcgcctctgcgtggcgactcttcccgctccgtgcgccccccgtcaccaaaatcatcataccgactcctgattcaaatgtatgatggtattcattgaacagaacaatggatcccccaccgttgctgaccgcaaaacatttacgcgattaatactgcgcgtaatataattaaaaatccagcattctcaatccattacgaaataagatggcattacggaatagccagactttctcgtgttaacgtccgacaaaatgcgtcattgacagcggtttctgtggattgacacatttcattcagataatgaattaatgctactgccggaacaaccagcaaacgggcattgtgttctgaaatccaggctattgattcaacgtcagcgacagatctgcgctgtaaaagaacttgtaaaacaacgtaatagaattatccggaatggtggcgactatgcactagggaaggtgcgaataagtggggaaattcttctcggctgactcagtcatttcatttcttcatgtttgagccgattttttctcccgtaaatgccttgaatcagcctatttagaccgtttcttcgccatttaaggcgttatccccagtttgcagaaactccgtaatgagattaaaagcgctcataactcatctgtcggccagaaggcgcgcctctgaattatccgacggacaaaccgggaacagtgtaatttcccggcaggagcgaaaaaattgaaaggcgcatcttactcttttcgctttcaaaaaaaagagtggtcatcgcgttaacacaccgccctgagatgaattagtgatgttttggctgcaccgcaacatacatttcgatatcccagtacccatcttccgcgccattgttcaaataaacctcgaagcagggctttggtaacatttcataagcactgtcctgcaagagactattaaagaactgataccagggtttagcaaaatcatcaccgactacacgagctaccgccaccgcatactgaccacctgtaatttctgtcagaatgacgccctcactgttttcgggaagcgtaaagtaacccggcaccgtcacgacggtgtcgcagcgtaatttttcggcgggtgtttcatctggattgtcgtaatagacagcaacccactccttcggcacaatatttttgctatctacccacatcatcaactgctcaaagcctttctttaccgtctgttcccacgggccaacgagatggaaacctgcaacggtacgtttctcttcctgcttaatctcgtagttcatgacgcctccattgatactgtttttatatacagtatagttgcaaaattaaaaccacaaggaatgagtgttgattatgcgagcagactcgcactcctgccagtctgctgcaaaagaaaggtcaggccttatggtggaaataatcactcaggcgagaaaacatgctgccttccccgacagattccagggtaaccagcggccagtgcgccacctgtttatcacggtcgtaaagttcaatttcccctacccgctgatgggcgctaattggcgcggtgagttctttaccatcaagggtatatttggctttgatatgtggaatttcggctttcggtagcaccatccagaactcttgttccgttcccaggtcgatattttctttatcgccataccagatgcgttccgttccgacctttttcccacggtgcaaaatttgcaccgtagtaaagttttgttgcccccaacgcagtaattttcttgcctcttcctcacgaccttttgcactgtcagcccccattaccactgcaatgagacgacgctgcccatctacagcgctagcaatgagattaaacccggcaccagaagtatgacccgttttcaggccgtcaacattcatggttttatcccacaacaacccgttacggttttgctgggtgataccgttccaggtgagacttttctcactgtacatatgataaaactcgggctcgccgtggatgatagcacgagaaagcacagctaaatcataagcgctgctatgctggccaggtgcatccagaccatgcactgtttcaaaatgcgtatccttgagatgcagcttctcggcatagttgttcatcatttcaacaaactgccgttgcccaccggcaatatagtcagccagagcaacacaagcgtcatttccggaatccacaattaaaccacggcttaaatcacgtacgcttacgcgatcgccctctttcaaaaacatcagactagaaccgacaaacaccggattatctttcgcccacgcatcgcgccccacggtgacaatatcgtctggcgtaatgcgatgactatcgatagcgcgatccacgacataacccgtcatcagctttgtcaggctggcgggattgcgctgttgatgctcattacccgcggtgaggatctgaccggtggtgtaatccatcaatacccaggacccggcatgaatctctggaggctgaggactaaaaggaatgttttccgccgcaaaaccagagcttaagttaaaaacgaacaaagaagcagcaataataagacggcgtttcaacagcaaaccctcaggagtttcaaatagctgttctttttacggaaatacttatgaactggctggaataaagtgcaagaaaatgtgactaccctctcatttttatctgacatgatctgttgccactcgctgccaaattgtggcgctaaagctgattagcacggtgatatttgatactctggcagacagcagaaataacggatttaacctaatgatgaatgacggtaagcaacaatctacctttttgtttcacgattacgaaacctttggcacgcaccccgcgttagatcgccctgcacagttcgcagccattcgcaccgatagcgaattcaatgtcatcggcgaacccgaagtcttttactgcaagcccgctgatgactatttaccccagccaggagccgtattaattaccggtattaccccgcaggaagcacgggcgaaaggagaaaacgaagccgcgtttgccgcccgtattcacagcctttttaccgtaccgaagacctgtattctgggctacaacaatgtgcgtttcgacgacgaagtcacacgcaacattttttatcgtaatttctacgatccttacgcctggagctggcagcatgataacagccgctgggatttactggatgttatgcgtgcctgttatgccctgcgcccggaaggaataaactggcctgaaaatgatgacggtctaccgagctttcgccttgagcatttaaccaaagcgaatggtattgaacatagcaacgcccacgatgcgatggctgatgtgtacgccactattgcgatggcaaagctggtaaaaacgcgtcagccacgcctgtttgattatctctttacccatcgtaataaacacaaactgatggcgttgattgatgttccgcagatgaaacccctggtgcacgtttccggaatgtttggagcatggcgcggcaataccagctgggtggcaccgctggcgtggcatcctgaaaatcgcaatgccgtaattatggtggatttggcaggagacattagcccattactggaactggatagcgacacattgcgcgagcgtttatataccgcaaaaaccgatcttggcgataacgccgccgttccggttaagctggtgcatatcaataaatgtccggtgctggcccaggcgaatacgctacgcccggaagatgccgaccgactgggaattaatcgtcagcattgcctcgataacctgaaaattctgcgtgaaaatccgcaagtgcgcgaaaaagtggtggcgatattcgcggaagccgaaccgtttacgcctagtgataacgtggatgcacagctttataacggctttttcagtgacgcagatcgtgcagcaatgaaaattgtgctggaaaccgagccgcgtaatttaccggcactggatatcacttttgttgataaacggattgaaaagctgttgttcaattatcgggcacgcaacttcccggggacgctggattatgccgagcagcaacgctggctggagcaccgtcgccaggtcttcacgccagagtttttgcagggttatgctgatgaattgcagatgctggtacaacaatatgccgatgacaaagagaaagtggcgctgttaaaagcactttggcagtacgcggaagagattgtctaatttgaagcctccgccgctggtacggcggaggacaatgttgagtcaggctttttgaacggtgatgctccacgctgcatcgccaatctgctgataatcggtgatggcatgtccttcttctgccgcccactgtgggattgcttcagttgcctgggtgcaatcaaactcaatcactaactcatcgccgctgaccatttctgccagagctgcttttgcttctatgagtggaaacggacagacctgcgtcaccacatccagctttttaatcaccatctttacaccttacttaatttgccgcagcagttgccagtcgcgccttacgctgcggtcgaacatacacaagccaggacgcagtccagactccgagaatcataaatacaaggccaatccagccctgccaggtcatcattgcagtcataaccagtccattaccgatagagcaaccacctgcaatactggcaccgaagcccatcagtacaccacctaacccgctacgtaatgttgtttgtgcatcagctgcgcgaacgcggaactcacggctcgctttggctgcaataaaactccccacgaagatccctaacaccaggaaaacgccccagttaatgtatttcatgtcacccgcgaccagaaattgcagaatattggccgttggggaagtgattcctaacccaaacatgcgtccggttgcttcactcaggggccaggctaaaagcgcaatcaaaccgatgagtacagctgtgacaaagggatgccagcgtttttcaaacagaatatgagcgatcccggttcggcgcggcggtaaggtcgcgactttgagttttggcttcttcaactctttcatcaccacccagagcgttatcaccagcaaaacggcaaccaacggccacacagacaaattaaaagtctcagcaatagagttatgttcagtactgtagtgctgcaaggtttgatttaaaccactggcatgtggagaacgcatcaccgcactcatcaccatataagtgaaaagcgcgatccaactgccgatcaatccctcacccgcgcgataccaggtcccggtggcacatccacccgccagaacaattcccagcccgaagatatacccacctataacagtaccaagccacgggaacgccccggcttcgtaagtcagtaggcccgcctgaattaacgcaaaaacccccacgctttgtacgctaattgcaatcagcaaggcgtaaaacatgcgattatttttcacgatatacatatcgcgaaaaccacctgtcaggcaaaaacgcccacgctgcatgacaaatcccagcagagcaccacaaattagcccgcttaatatcatactaaacataaattaattaaccagatgaatgttaatgaggaaattattcatgactggtggaatgcagaccaataaccaaattctctaaattagaacaaatggttattaatgaggagttcgatacaaaagaataaaaaaaccggagccaaatgttcattcgactccggtttattattagaaaagatgattatgctacgtcttcgtactgcggaaccggattacggaagctcttggtgacgcaagccaggtaaatcagaccgatagcagcccagatcagacccagaaccatactgctttcttccaggttaacccacagcgcaccaacggtcagcgcaccacacatcggcaggaacagatactggaagtgatctttcagcgtcttgttacgcttctcacggatccagaactggctgatgacgctcaggttaacgaaagtgaacgccaccagcgcaccaaagttaatcagcgccgttgccattaccaggtcgaagttgattgccagcagggcaatcgcgccaaccaggatgatgttcatcgccggagtacgccatttcgggtgtacataaccgaagaagcttttcgggaatacgccgtcacgacccattacgtacatcagacgcgctacgcctgcatgcgccgccataccggacgccagtacggtaatggtggagaagatcagcgcgccaacctggaacgctttacccgcaacgtacagcatgatttcaggctgactcgcatccggatctttaaagcgagagatatccgggaagtacagctgcaggaagtaagttgcaaagatgaagatcatgccgccgatcagcgcggtcaggaaaatcgcacgcgggatcacgcgctctgcatctttggtttcttcgctcaggttgctgatgccgtcaaagccggtaaaggagaagcacaggattgtcgccccggtaatcatcgggataacatgcgcatcgccagaccagaatggacgagtgctcgccagcgtaccagcgccttcaccttcaaatacgccataaacaaccatgcccagaatcaccgcgatcagcactacctgcaacacgacgattacagtgttgaagttcgctacggatttcagactacgcaggttaaaggcggtcataaaggccaccagcgccaccacaaacatccagcttgggatggaaggcaccagagcttcaaaatagattttcgccagtagaatgttgatcatcggcgcgaacagatagtcgagcagagaagaccaacccaccataaagccgacagtcgggctaatggatttctgggcgtaagtgtatgcagagccagcagaaggatagcggcgaaccagcttcccgtagctcagagccgtaaacaggatcgcaatcaatgcgaacgcataggctgtcggcacatgaccatccgtgaggccactaacgataccaaaagtatcaaacagcgtcatcggctgcatataggcaagacccatcattacaaccggaactaacgtaagcgttttacgcaattccacgcgagaggtgtttggagtaacgttatggctcatggtcattctcctttacggtgataaccgtcgcgtaagcaaaaaattgccccatttttttggattcctcagcgacaacaactgtcgatttttagtaaatatctatccggtacgaagcccggcctcttggtatgaatgattggtttgaagcaaaaaataaccgacgctgatgaaacgtcggtttttagtcattttttgacagcggcgcattgtgcctaaatgggggggaaatgacaagagaatgagaggcttgtcagaataatttttctttaaatggcactttttccgtcatcagattttgcataaacaccggcgatcgcactatttgctaaaatttcatcccgccaccagccactggcaagtcctgcggtctgttcgttccagccaatccagacgggttcaaagagagtttgggcgaccactttcttctcgattaacgcgccactatcgagaaaacgttgcgccagataacggggtaaatagccgcagccgaggccgctaatttgcagctccagtttggttttaaaatcgaaaacggtaatggcttcttgttcgtcgagaagttgacttgccgtagaagcgcctgcctgcgcagtatcccccaccacaatcgcccgatatcgcttaataatacgacgatttaacggctcttcttccagggctaacggatgatgaggcgcgaccgcaaagacttgttccagatcgcccaaccgactaaaaccaaactcactggaagatggtggctcatgcatcgcgccaacaataatatccgctcgcccctgagtcagggcatcccaactaccaccgagtacgccattgataaacttcaggcgcgtcacgctatgatgttgataaaaagcttcaatgagtggcgcaagcagagaaaaaggaaacgtgtcgtccacgccaatcaccagctcgttttcccagccttcatgcagtttgatcgcctgcttttccagttcccgcacggtatgcagaacttcccgccctttctctaataacatttttccggtgcgggtgaatttagcgcggtgtccgctacgatcaagcaattgaatattaaggtcgctttccagcttgtgaacggtgtaactcagagcggacggcgtcttgtagagtttggcgctcgccgccgcaaaactgccttctttttctaaggcatcgaggatcatcaacacatccagcagtggtttcatacacgcccccttgcagtgcatgcggcgtcctgctggcgtgatcgtttactccagcggcattaccagcggatcgggatactggtattcaaatcccagttcattacaaatccgactgccatcaataatcttacctttgccgctgtccagactatttctgaactgcggaggttccagccccagtaaacgggccatctgcggatagaaaacattacgcgcagggtgagctggcgcacatatattatagatgtgtccgcctttaggtgcctgtaacaacagagtgatagcgccaataacatcttctaaatggactaaattaacaccatgttcaccatcaggcgcggtttttccggcaaagaagcgtccgggatgacgtcccggtccgaccaggcccgcaagacgcagaatatcgacgctagtaccgggtaaattgtgcagccagtcttcgagttcttctaatactcgtccactgttggttactggattacgcggggtggtttctttcaccgtgccttgcgcgtcgccatagacagatgtactgctggtaaaaataatgcggggaatacgatgggccagcgcgctatccactaactcttgtaccgcttgtaaatagaactcatcgccggggccgctacgacgtgccggaagcgtaatgaccagcgcatcggcatccatcagggcatccagatcgtcagaatcgcaaactagctcaggctccatgcgaagcagatagctatcaatgccactcattcgggccgcttcgacaccatcttgtgtggttttactcccggtgacttgccagcctcgcgcactaagactcatcgccagcggcatgcctaaccaccctaacccgacaattgcgacctttttcatccgttatctcctgatacaccttagatctataaggctacgctagcgtatcaaaactgacaattcattctatgaatgaatctgttcaataatgataacgacatgctgcaatgagcagactatcgtcggtaaccgcgtataccagacggtgctcctctgtaatgcgtcgggaccagaaaccactcaaattatgtttcaggggttctggcttccccttaccttcaaatggcgttctgcgggtatctttgataagttcattgatctttttaacaattcgcttatctgtttcctgccagtacagataatcgtcccaactttcctcagaccagattagtttcactcaatgatgtccttttccgttcctttgccacttttcaggctatcgatactgtccatcaatctccgggcgttagcgggggagcgcagtagataagccgtctcttccaggctgttgtattcttcgagactcatcagaacacaagcctctccattctgacgagtaataaggatcggggcatgatcttcaacggctttcatcattgttgcgctcaaattctgacgcgcttcgctgtagctaattgtacgcatgtcaatctcctcttttgtacagttcattgtacaatgatgagcgttaattaactatttattaattagtttgtagatcaaggtattgtcagtgagacgaaaatccaggcttcgctatttttggtgccatcagctaagaggacagtcctcttagccccctcctttccccgctcattcattaaacaaatccattgccataaaatatataaaaaagcccttgctttctaacgtgaaagtggtttaggttaaaagacatcagttgaataaacattcacagagacttttatgacacgcgttcaatttaaacaccaccatcatcaccatcatcctgactaatctttcaggcgatgtgtgctggaagacattcagatcttccagtggtgcatgaacgcatgagaaagcccccggaagatcaccttccgggggcttttttattgcgcggttgataacggttcagacaggtttaaagaggaataacaaaatgacagacaacactcgtttacgcatagctatgcagaaatccggccgtttaagtgatgacagtcgcgaattgctggcgcgctgtggcattaaaattaatcttcacacccagcgcctgatcgcgatggcagaaaacatgccgattgatattctgcgcgtgcgtgacgacgacattcccggtctggtaatggatggcgtggtagaccttgggattatcggcgaaaacgtgctggaagaagagctgcttaaccgccgcgcccagggtgaagatccacgctactttaccctgcgtcgtctggatttcggcggctgtcgtcttagcctggcaacgccggttgatgaagcctgggacggtccgctctccttaaacggtaaacgtatcgccacctcttatcctcacctgctcaagcgttatctcgaccagaaaggcatctcttttaaatcctgcttactgaacggttctgttgaagtcgccccgcgtgccggactggcggatgcgatttgcgatctggtttccaccggtgccacgctggaagctaacggcctgcgcgaagtcgaagttatctatcgcagcaaagcctgcctgattcaacgcgatggcgaaatggaagaatccaaacagcaactgatcgacaaactgctgacccgtattcagggtgtgatccaggcgcgcgaaagtaaatacatcatgatgcacgcaccgaccgaacgtctggatgaagtcatcgccctgctgccaggtgccgaacgcccaactattctgccgctggcgggtgaccaacagcgcgtagcgatgcacatggtcagcagcgaaaccctgttctgggaaaccatggaaaaactgaaagcgctgggtgccagtagtattctggtcctgccgattgagaagatgatggagtgatcgccatgagctttaacacaatcattgactggaatagctgtactgcggagcaacaacgccagctgttaatgcgcccggcgatttccgcctctgaaagcattacccgcactgttaacgatattctcgataacgtgaaagcacgcggcgatgaggccctgcgggaatacagcgcgaagtttgataaaaccacggttaccgcgctgaaggtgtctgcagaggagatcgccgccgccagcgaacgcctgagcgacgagctaaaacaggcgatggcggtggcagtaaagaatattgaaaccttccacactgcgcaaaaactgccgccggtagatgtagaaacgcagccaggcgtgcgttgccagcaggtcacgcgtccggtagctagtgttgggttgtatattcctggcggctccgccccgctcttcagtacggtattaatgctggcgactccggcgagtattgcgggctgtaaaaaagtggtgctgtgcagtccgccgccgattgccgatgagatcctttatgcggcgcagctgtgcggtgtgcaggacgtgtttaacgtcggcggcgcacaggccattgccgcactggcgtttggtacggaatctgtgccaaaagtggacaaaatcttcgggccgggtaacgcctttgtcaccgaagcgaaacgtcaggtgagccagcgtctggacggtgcggcgatcgatatgcccgcaggcccgagcgaagtgctggtgattgctgacagcggcgctacgccggatttcgtggcttctgatttgctctctcaggctgaacacggcccggacagtcaggtgattttactgacgcccgctgctgatatggcgcgtcgcgttgccgaggccgtcgaacgccaactggcagaactgccgcgtgccgaaaccgcccgccaggcactgaacgccagccgcctgatcgtgactaaagatttagcgcagtgcgtggagatctccaaccagtacggcccggagcacctgatcattcagacccgcaacgcccgtgaactggtcgatagcatcaccagcgccggtagcgtatttcttggtgactggagtccggaaagcgcaggtgattacgcctccggcaccaaccacgttctaccgacttacggttacaccgccacctgttccagcctcgggctggcagatttccagaagcgcatgaccgtacaggaactgagcaaagaggggttctccgcgctggctagtaccatagaaacactggccgccgccgagcgcctgaccgcccacaaaaatgccgttactttgcgtgttaacgcccttaaggagcaagcatgagcaccgtgactattaccgatttagcgcgtgaaaacgtccgcaacctgacgccgtatcagagcgcgcgtcgtctgggcggtaacggcgatgtctggctgaacgccaacgaataccccactgccgtggagtttcagcttactcagcaaacgctcaaccgctacccggaatgccagccgaaagcggtgattgaaaattacgcgcaatatgcaggcgtaaaaccggagcaggtgctggtcagccgtggcgcggacgaaggtattgaactgctgattcgcgctttttgcgaaccgggtaaagacgccatcctctactgcccgccaacgtacggcatgtacagcgtcagcgccgaaacgattggcgtcgagtgccgcacagtgccgacgctggacaactggcaactggacttacagggcatttccgacaagctggacggcgtaaaagtggtttatgtttgcagccccaataacccgaccgggcaactgatcaatccgcaggattttcgcaccctgctggagttaacccgcggtaaggcgattgtggttgccgatgaagcctatatcgagttttgcccgcaggcaagcctggctggctggctggcggaatatccgcacctggctattttacgcacactgagcaaagcttttgctctggcggggcttcgttgcggatttacgctggcaaacgaagaagtcatcaacctgctgatgaaagtgatcgccccctacccgctcagcacgccggttgccgacattgcggcccaggcgttaagcccacagggaatcgtcgccatgcgcgaacgggtagcgcaaattattgcagaacgcgaatacctgattgccgcactgaaagagatcccctgcgtagagcaggttttcgactctgaaaccaactacattctggcgcgctttaaagcctccagtgcggtgtttaaatctttgtgggatcagggcattatcttacgtgatcagaataaacaaccctctttaagcggctgcctgcgaattaccgtcggaacccgtgaagaaagccagcgcgtcattgacgccttacgtgcggagcaagtttgatgagtcagaagtatctttttatcgatcgcgatggaaccctgattagcgaaccgccgagtgattttcaggtggaccgttttgataaactcgcctttgaaccgggcgtgatcccggaactgctgaagctgcaaaaagcgggctacaagctggtgatgatcactaatcaggatggtcttggaacacaaagtttcccacaggcggatttcgatggcccgcacaacctgatgatgcagatcttcaccagccaaggcgtacagtttgatgaagtgctgatttgtccgcacctgcccgccgatgagtgcgactgccgtaagccgaaagtaaaactggtggaacgttatctggctgagcaagcgatggatcgcgctaacagttatgtgattggcgatcgcgcgaccgacattcaactggcggaaaacatgggcattactggtttacgctacgaccgcgaaaccctgaactggccaatgattggcgagcaactcaccagacgtgaccgttacgctcacgtagtgcgtaataccaaagagacgcagattgacgttcaggtgtggctggatcgtgaaggtggcagcaagattaacaccggcgttggcttctttgatcatatgctggatcagatcgctacccacggcggtttccgcatggaaatcaacgtcaaaggcgacctctatatcgacgatcaccacaccgtcgaagataccggcctggcgctgggcgaagcgctaaaaatcgccctcggagacaaacgcggtatttgccgctttggttttgtgctaccgatggacgaatgccttgcccgctgcgcgctggatatctctggtcgcccgcacctggaatataaagccgagtttacctaccagcgcgtgggcgatctcagcaccgaaatgatcgagcacttcttccgtagcctcagttacaccatgggcgtgacgctacacctgaaaaccaaaggtaaaaacgatcatcaccgtgtagagagtctgttcaaagcctttggtcgcaccctgcgccaggccatccgcgtggaaggcgataccctgcccagcagcaaaggagtgctgtaatgaacgtggtgatccttgataccggctgcgccaacctgaacagcgtgaagtctgccattgcgcgtcacggttatgaacccaaagtcagccgtgacccggacgtcgtgttgctggccgataaactgtttttacccggcgttggcactgcgcaagcggcgatggatcaggtacgtgagcgcgagctgtttgatctcatcaaagcctgtacccaaccggtgctgggcatctgcttagggatgcaactgctggggcggcgcagcgaagagagcaacggcgtcgacttgctgggcatcatcgacgaagacgtgccgaaaatgaccgactttggtctgccactgccacatatgggctggaaccgcgtttacccgcaggcaggcaaccgcctgtttcaggggattgaagacggcgcgtacttttactttgttcacagctacgcaatgccggtcaatccgtggaccatcgcccagtgtaattacggcgaaccgttcaccgcggcggtacaaaaagataacttctacggcgtgcagttccacccggagcgttctggtgccgctggtgctaagttgctgaaaaacttcctggagatgtgatgattattccggcattagatttaatcgacggcactgtggtgcgtctccatcagggcgattacggcaaacagcgcgattacggtaacgacccgctgccgcgattgcaggattacgccgcgcagggtgccgaagtgctgcacctggtggatctgaccggggcaaaagatccggctaaacgtcaaatcccgctgattaaaaccctggtcgcgggcgttaacgttccggtgcaggttggcggcggcgtgcgtagcgaagaagatgtggcggcgttactggaagcgggcgttgcgcgcgtagtggtcggctccaccgcggtgaaaagtcaagatatggtgaaaggctggtttgaacgcttcggtgccgatgccttagtgctggcgctggatgtccgtattgacgagcaaggcaacaagcaggtggcagtcagcggctggcaagagaacagcggcgttagtctggaacaactggtggaaacctatctgcccgtcggcctgaaacatgtgctgtgtaccgatatcagccgcgacggcacgctggcaggctctaacgtctctttatatgaagaagtgtgcgccagatatccgcaggtggcatttcagtcctccggcggtattggcgacattgatgatgtggcggccctgcgtggcactggtgtgcgcggcgtaatagttggtcgggcattactggaaggtaaattcaccgtgaaggaggccatcgcatgctggcaaaacgcataatcccatgtctcgacgttcgtgatggtcaggtggtgaaaggcgtacagtttcgcaaccatgaaatcattggcgatatcgtgccgctggcaaaacgctacgctgaagaaggcgctgacgaactggtgttctacgatatcaccgcttccagcgatggccgtgtggtagataaaagctgggtatctcgcgtggcggaagtgatcgacattccgttttgtgtggcgggtgggattaagtctctggaagatgccgcgaaaattctttcctttggcgcggataaaatttccatcaactctcctgcgctggcagacccaacattaattactcgcctggccgatcgctttggcgtgcagtgtattgtggtcggtattgatacctggtacgacgccgaaaccggtaaatatcatgtgaatcaatataccggcgatgaaagccgcacccgcgtcactcaatgggaaacgctcgactgggtacaggaagtgcaaaaacgcggtgccggagaaatcgtcctcaatatgatgaatcaggacggcgtgcgtaacggttacgacctcgaacaactgaaaaaagtgcgtgaagtttgccacgtcccgctgattgcctccggtggcgcgggcaccatggaacacttcctcgaagccttccgcgatgccgacgttgacggcgcgctggcagcttccgtattccacaaacaaataatcaatattggtgaattaaaagcgtacctggcaacacagggcgtggagatcaggatatgttaacagaacaacaacgtcgcgaactggactgggaaaaaaccgacggacttatgccggtgattgtgcaacacgcggtatccggcgaagtgctaatgctgggctatatgaacccggaagccttagacaaaaccctcgaaagcggcaaagtcaccttcttcagccgcactaaacagcgactgtggaccaaaggcgaaacgagcggcaatttcctcaacgtagtgagtattgccccggactgcgacaacgacacgttactggtgctggcgaatcccatcggcccgacctgccacaaaggcaccagcagttgcttcggcgacaccgctcaccagtggctgttcctgtatcaactggaacaactgctcgccgagcgcaaatctgccgatccggaaacctcctacaccgccaaactgtatgccagcggcaccaaacgcattgcgcagaaagtgggtgaagaaggcgtggaaaccgcgctggcagcaacggtacatgaccgctttgagctgaccaacgaggcgtctgatttgatgtatcacctgctggtgttgttgcaggatcaggggctggatttaacgacggtaattgagaacctgcgtaaacggcatcagtgagttgcggggtaagcggatgcgatattgttgccgcatccggcaaaaaaacgggcaaggtgtcaccaccctgccctttttctttaaaaccgaaaagattacttcgcgttgtaattgcgtagagcattacgccccagcacaatccccgcgccaaccatgccacccagcagcaccgccagaatcaaggtaattgcctttttcgggctatcacgacgaataggtaacatcggtttcatcacataacggtaagcatgaatatcaagatcatcaacttttaagctttcgatatccagcaggttttgacgagtctgatagtagtttgggctgaacaccaacggacgggtcgcctcatgcttaatcatgctctccagcgcttcgctccccaaaaggaacaacgtatcttgtgtgatatcttcgccagtctgttgaatctgcggttttgtcacctgcgcctgattcgcatactgcaacgcttcctgaatctgacggatacgcagatctttctgctcctgcgcgactacttcctgcgttcttaaagagtcctgcaagtttttccgtcccagagcaatgttgtctttgagatccttttctagctcttgattcactttatcgtcaacttgctgaatgtattgggccaacttcatttgtgcgccctctgcagtttgcccaacataagaaacagtcaatggtaattgctggttcttaacagaaggttcgatggtaagtttttctcgttcttcctgattatccagcgtttctgctaatgcagagaaggcagaactgaagcgaccaattaacgtctcctgcaaatcgcttactttcggtgcagcctgaccatagataacattcatggcattgttatagccagcaatttgccccacgtcgggctgagtgataattgctgtactcgtccatttctccttcgctactgccaaatatccaatagccagggcaatagccacaatgacggaaatgatgattgtcatcttgccacgccacaactgcactagtaaatcaatcaaatcaatctgttccgggtcatggttttgcccagaaacattattattttctactctcatcattaccctaactgacggaaatttccaagtccgcatagtttagcgataatcctcgtgaatgctataggataagtgataaaaataatgaattgttgtgtaagtaacaaaagacaatcagggcgtaaatagccctgataacaagatgttagtcgctgccaaagagatcgcgggtgtataccttatctgccacatccttaagctcttctgccattcggttagagataatgacgtcggcttgttgtttgaaggtggcgagatcacgttccaggcgagagttgaagaaactgtcttctttcatcactggctcgtagatgatcacttcaacacctttcgccttgatacgtttcataatcccctgaatagaagacgcacggaagttatcactaccgctcttcataatcagacgataaatacccaccacttgcggcttgcgactcaaaatggcatcggcaataaaatctttacgcgtgcggttagcatcgacaattgcgctgatcaggttattcggcacagactggtagttcgccagtaactgcttggtatctttcggcagacaataaccaccataaccaaagctcggattgttgtaatggttgccaatacgtgggtcgagacaaacgccttcgattatttgacgggaattcagacctaaactttctgcatagctatccagttcgttaaagtacgccacgcgcatcgccaggtaggtgtttgcaaaaagtttaatcgcttctgcttcagtggagtcggtaaacagcatcgggatattttgcttaatcgcgccttcctgtaacagagcagcgaaacgttctgcgcgttcactacgctcaccgatgacaatacgactaggatggagattatcgtaaagggctttaccctcacggagaaattccggggagaatataatattttcagtgcgatatttcttatgcatcgctgcggtaaaaccaacgggaaccgtacttttgatgaccataaccgcataaggatttatctcaactacgtctttaattacactttctacactggatgtattgaaataattagttttaggatcatagtcggttggagtggcgatgatgacataatcagcatcccggtaggcttcatttttatctaatgtggcattaaagtgtattttatcactttgcaaaaactgctgaatttccttatcaacaataggagatatccgatcattcagcatagcaacgcgactcggtaaaatatctaatgccacaacctcatgattttgtgcgattagaagcccgttactcaagcctacatagccagtaccggaaatggtgattttcatttcatgctctcagaattaacttaactgtgaatcatgatgtttttagcatcctgataagagctaaaagttttaacgctacgttgttcgatggtcaacgcaacgaaaaacaattcagattttctttataagaatagctgatatttattaagttaatattaagcagtgaaatttagtctataagatatttggcaaaaaaaagcccggtgcaatatacgccgggcctcaattttattgttggttaaatcagattaatccagccattcggtatggaacacaccttctttatcaatacgcttataagtatgcgcaccaaaatagtcacgctgtgcctggatcaggttcgcaggcagaacagcagcacggtagctgtcgtaataggcaaccgctgcggagaaggtcggaaccggaataccgttctgtactgcataagcaacgacatcacgcagcgcctgctggtagtcatcggcaatttgcttgaagtacggagccagcaacaggttagcgatctgtggattttcggcataagcatcggtgattttctgcaggaactgcgcacggatgatgcagccagcacggaaaatcttcgcgatttcgccgtagttcagatcccagttgtactcttcagacgcagcacgcagctgagagaagccctgggcgtaagaaacgattttgcccagatacagcgcacgacgaactttttcgatgaactcagccttgtcgcctgctggctgtgcttgcggaccagagagaactttagatgcggcaacacgctgatctttcagagaagagatataacgtgcaaacacagactcggtaatcaggctcagcggttcgccgagatccagcgcgctctggctggtccatttaccggtacctttgttagccgcttcatccaggatcacatcaaccaggtagttaccgtcttcatcttttttggtgaagatatctttggtgatgtcgatcaggtaactgctcagttcaccgttattccactcggtaaaggtctgcgccagttcttcgttggtgaggttcaggccacctttaagcagagaataggcttcagcaatcagctgcatatcgccgtattcaataccgttgtgaaccatcttcacatagtgacctgcgccatcggcaccaatataggtaacgcatggttcaccgtcttcagctacggcggcgattttggtcaggatcggtgctaccaattcataggcttctttctggccaccaggcataatagaaggacctttcagcgccccctcttcaccgccagaaacaccggtaccgatgaagttaaagccctctgcactaagctcacgattacgacgaatagtgtcctggaagaaggtgttaccaccatcaatgatgatgtctcctttatcgagatatggtttgagggaatcaatagcagcatccgtgcctgcacctgctttcaccattaacaggatgcgacgaggcgtttccagagattcgacaaactctttcaccgtatagtaaggaaccagtttcttgcctggattttcggcaatcacttcttccgtcttctcacgggaacggttgaaaatagagacggtataaccacggctttcgatgttgagcgcaaggttgcgtcccatcactgccataccgactacgccgatctgttgcttggacattacatactcctgtcaggtgtgatcaccgcgctgaatgctcgcggcctggaatgttcgcaaataagtatacaaagtacttattaaagtataaatagcttatccatgcttatatgcttacggctttatatgtctccacatgcgatatttcttaaataatgttttattattaccacttttaattcagggataatgtgaggttattaccctcaaataatatgagataaatagtgctgcaacattgcatttttgccccgatttatccatgatcgaattgtgacatttgtcatacaacgaataggttttgtacttactatggaatggattgccgatccgtctatctgggccgggttaatcacgctgattgtgatcgaactggtcctcggcattgataacctggtctttattgccatcctcgccgaaaaactaccgccgaagcagcgtgaccgcgcacgggttaccgggctgctgctggcaatgttaatgcgcctgttactgctggcgagtatctcctggctggtcaccctgactcaaccgctgttcagcttccgcagctttacctttagcgcccgcgacttaatcatgctgtttggtggtttcttcctgttgttcaaagccacgatggagctgaacgaacggctggaagggaaagacagcaataatcccacacaacgcaaaggtgcgaagttctggggcgtggtgacgcaaattgtggtactggacgccattttcagtctcgacagtgtgattaccgccgtcgggatggtcgaccatttactggtcatgatggccgccgtggttatcgctatcagcctgatgttgatggccagcaagccgttaacgcaatttgttaacagtcacccgacgatcgttattctctgcttaagcttcctgttgatgattggctttagcctggtggcagaaggtttcggcttcgtcattccgaaaggctacctgtacgctgccattggtttcagcgtgatgatcgaggcgctcaatcagttggctatctttaaccggcgacgttttctttccgctaaccagacgctgcgccagcggactaccgaagcggtaatgcgcctgcttagcgggcaaaaagaagatgcggaactggacgccgaaaccgcgtccatgctggtggatcatggtaaccagcagatctttaatccgcaggaacggcggatgattgagcgggtacttaatcttaaccagcgtaccgtcagcagcattatgacgagccgccacgatattgagcatatcgatctcaacgcgccggaagaagaaatccgccagttgctggagcgaaatcagcatacgcggctggtggttaccgacggtgatgacgcagaagatttgctcggtgttgttcacgttatcgacctgctacaacagtctctgcgcggcgaaccgctcaacctgcgggtgttgattcgccagccgctggtgttcccggaaaccttgccgttgttacctgccctggagcagttccgtaatgcccgcacgcactttgcttttgtggtggatgagtttggcagcgtggaagggattgtgacattaagtgacgtcactgaaaccattgccggtaacttaccgaacgaagtggaagagatcgacgcccgccatgatattcagaagaatgcggacggttcctggacggcgaatggtcatatgccgctggaggatctggtgcaatatgtgccgctgccgctggatgaaaaacgtgaatatcacaccattgccgggctgttgatggagtatttgcagcgtattccaaaacctggcgaagaagttcaggtgggggattatttgcttaaaacgttgcaggtagaaagccatcgcgtgcagaaggtgcagattataccgctgcgtaaggatggcgagatggagtacgaggtgtgatggtatcggtcattttacccaatagccgaaaggaataagatgagggaaccgcgccatcggcgatttaccgccgggagcccgggttgccagggtggtggagattgagccaccctggcacgttcaccggcttgagcgttccatagtagcgaggaacatcaagtgaacggaacagccttcgatcttacatattcagaatataatgatgccgccacgaacgcctgatgcgacgctttacgcgtcttatcaggcctacaggactggtcacctggtaacttacatcttctccagcaacttcttcacatctttgccattacgggaatctttattccgctcggcccagtcattcaggcgacgtttcgcttcgtcctgtagatgtttgcgcagtaactgatccacttgcaggctgtaattgagttgctgccagttgccataaacccgcagcggtactggcgtttctttcaggaaatcaatcagtttgctttccccgttccagccacccacgacccgaatatcaaactgggtgtcgcaggtttgatctgccagattcaacatgccttcccctgtcagcgccagcacagggctttgaccttgcatgtcgtttaacgtcacgacgccatccttcaacgtcaaatcggtggtaaagcggtcaagccgcgtcacgttatcaaagttttcagcggccttcacatcaccgccattacgctctaccgcttgctgaatcatctgctggaagttcatcccttccatgcgcgtgtcggtcatttcgacatgtgcctgtccttgccagttgtggcggaatgcgtcggcatctatgtcagcaccggagaaatcaccagccagactcatttttccggtcaagctaatcggatagttaaacgccttcagaatggtaccaatctcaacgttttccagccgtggctggaagtttatccgcggatttatacttgtcgcgtccagcgtgcccggcagactaacctgtccaccgttaagtttgccctgcagttgagtaatttccagcaaaccgctcttgttggtcatttgcgtggcaacatctgtaaaattcattccgcgccagcgcacgttactggcctgcaacaaaatatcagccgtaaagccttgcagtccctgataggccggttcatcaatacggctagaaatgaccgggcgcggcaacgtactttggctctgcccctgctgcgcggcaccgttttcaccattcgcggtttcattaagcgggatgaggttgtcaagattcagttgcgggaattgcagcctcagctgccattccggtttctctgtcagcgtaacctgtgcttgcccgcttagcgtactatcattggcggtcaaactaatttggttaaaactaaggcgtttatgactctcctgccactgggcctggaaactcccctgcccctgaataccttgttttggtaaatcggcaccctgcaactgccagttaatttgttcaatagccgccgttaaatcatgcggataatcagaagcatctaccgtaccgttaagggatatcgtgagatcgcgctgatcgcgattaacccgcccggagaactcaaaactaccacgatgttggggatcttgttccatttgcaggcgaatattgcggattgtcacctgctcgtcatcttcatgctggaacaccagcacgctgtccgccaccttaagactggatatatcaaagctccatccgcgatcgtcactcagatccggcaaggtattgtcgcgcggtgcaaccggagcgtcttcactgcgcaccgcttccgtctgcggcgtcagttggatcactgccccttttagcatcacctgcttaacgctcagttgatgactcagtagtggtaaaagcgccacgtccagacgcatgttgtcggcgcgaaccagtggctggcttgcgccctgggcggtgagagacattcgcccggagaggatactaagctgcggccagacgtgccaacgcagtggcccgtcgagctgcaattgataaccgctacgtgcagcaacttgcttgaccatatagtcgcggaaatcattcggattcaccagcaacactaacgcagataacccggccaccagcacgaccaggagtatcatcagcgtcgtcagaaatcgtctcatggtatcctcaatgggcctgaattagtctttatcgattcggctggctaccgcgccctgctggttgcgatatttcgcatcttcacggcggttgtaaggtcgcaccgccgggccggaaagcggctcaaagctcagcgcaccaattaacatgcccggacgcagcgccagcggcagcttaccggagttgtagaactccagcacaatgcaaccagaccagcccggatcgatgcggtgcgcggtgacgtgcaccatcagccccagacgcgccagactggaacgcccgtccagccagcccaccagatcggctggcagcgtcacgctctccagcgtcaccgccagcgccagctctcctgggtgaagatagaacgcctcgccctcgtcgagaacgatctcatcgctcatcacgcggtcaagcgcggcgctcacttcatctttgggaccgctcagatcgataaacgctgccgtgtgaccacggaaggtacgaaatttattgcccaggcgtacatccaccgtcgcgccgttaatacgctccactggcggacgtgggttgatgctcaaacggccttcatcaagccaggcttcaatatctcggtcacacagacgcatggcattttctcctttcgcgcatcactcccttaacgccaattacgtcaagggcatactaggttatcactgaacggtacacaatttatcaagcttattcaaagaactgacttattttcgctttcaatatatcgatcgcgatgcggtttttcccgccgcgcggcacgataatgtccgcatattgtttagaaggctcaatgaattgcaggaacatcgggcgcacggttttttgatattgcgccatcacactatccatactacgcccacgctcgttaacgtcacgcttgatgcggcgcatcaggcagatatccagcggggtatcaacgaaaatggagaagttaagttcgtcacgcaaacgcgcatccgtcagcaacaaaatgccttcgagaatgatgaccttcttcggctcaaccgtcaccgtttctttcatacgcgtatgttcaacatagctgtaaaccggcaggtcaattgcgctgccgcgtttcaacgcttgtaaatgctcaagcagcagactgtgatccatcgcgctgggatggtcgtagttggtcttaacgcgttcttccatgctcagatggctttgatctttgtaatagcagtcttcgggaattacgccgatgtgttcatcaccgacttgctcacgcaattcacgataaagggtactggcaataagactcttgccggaagcgcttgcgccagcgataccgataatgacgcactgatgagactgatcagtcatatatttagcgacctgattaacctggatgttaggaagggggcgacgaagcgccaaacgcggcaattatagggatttcatccgtctgataccagtcgaatagcgttgccgcgcgctcagagttaattgttgacaaagaattcccgggggcaaattacgttgatcagttttatgtaaggtaaaaaatgttaaacgcagttgcgcaaattatccgcctttacgtcactttatgagcaattcgcatataaaatgtaaaacttttgtactagcataaacacagaaacgaatactggcgaccaggtcttgcggataaagcggtaatgagcaaacaaagtcagcatgtattaattgccctgccccacccgctgcttcacctggtcagtttaggtttagtcagctttatctttacccttttcagccttgagcttagccagtttggcacccaactcgccccactgtggttcccgacgtccatcatgatggtggcgttttatcgccatgccgggcgcatgtggccgggaattgcgctgagctgtagcctgggaaatatcgccgcatccatcctgcttttttccaccagcagcctgaacatgacctggacgaccatcaatattgttgaagccgtggtcggggcagtgctgctacgtaaattgctgccgtggtataaccccttgcaaaatctggctgactggctgcgtctggcactcggcagcgccattgttccgcctctgttggggggtgttctggttgtcctgctgacgcccggagacgatcctctcagggcatttttgatatgggtactgagtgaatccatcggcgctctggcactggtgccgctgggattgttatttaaaccacactatctgctgcgccatcgcaacccacggttgctttttgagagcctgctcacgttagccatcacactgacgttaagctggcttagcatgctgtatctgccgtggccttttactttcattattgtgctgttgatgtggagcgccgtgcgtctgccacgaatggaagcctttttgatcttccttaccacggtgatgatggtgagcctgatgatggccgcggatccctccctgcttgctacgccgcgtacgtacctgatgagccatatgccgtggctaccgtttttgctgatcctgctgcccgccaacatcatgaccatggtgatgtatgcctttcgtgcggaacgcaaacacatttccgaaagcgaaacccactttcggaacgcgatggaatattccgctatcggtatggcgttagtgggcaccgagggacaatggctgcaaaccaacaaagcgctctgccagtttctcgggtacagtcaggaagagctgcgcggactcacctttcagcaactgacctggccggaggatctcaataaagatctccaacaggttgaaaagctgataagcggtgaaataaacacctatagtatggaaaaacgctactacaaccgcaatggcgatgttgtctgggcgttgcttgccgtcagtctggtgcgccacacggatggcacgccgctctattttatcgctcagattgaagacattaacgagctaaaacgcaccgaacaggtcaatcagcaactgatggagcgcatcactctggctaacgaagcgggcgggattggcatctgggagtgggagttgaagccgaatatttttagctgggataagcggatgttcgagctgtatgaaattcctccacatatcaaaccgaactggcaggtgtggtacgagtgcgtgctgccggaagatcgccagcatgccgaaaaagtgattcgtgatagcttgcaaagtcgcagcccctttaaactggaatttcgcattaccgtaaaagacggtattcgccatatccgcgccctcgccaaccgggtactgaataaagaaggcgaagtcgaacgtctcctcggcatcaatatggatatgaccgaagtgaaacagcttaacgaggcattgtttcaggaaaaagagcgcctgcacattacgcttgattccatcggtgaagccgtggtctgtattgatatggcgatgaaaattacctttatgaatccagtggcggagaagatgagcggctggacgcaggaagaagcgttaggtgttccgctcctgacggtgttgcatattacttttggcgacaacggaccattaatggagaacatttacagtgccgacaccagtcgttccgcgatcgagcaagatgtggtgttgcactgtcggagcggcggcagttacgacgtgcattacagtattacgccgttaagtactctggacggcagcaatattggtagcgttctggtgattcaggacgttaccgaaagtcgcaaaatgctgcgccagctgagctacagcgcctcccatgatgcactgacgcatctcgccaaccgcgccagttttgagaaacaactgcgtatcctgctgcaaacggtaaacagtacacatcagcgacatgccctggtgtttatcgatcttgatcgctttaaagcggtgaatgacagcgccgggcatgcggcgggtgacgctttgctgcgcgaactggcgagcttaatgctgagtatgctgcgttccagcgacgtgctggcgcgactcggtggggatgaatttggtctgctgctaccagactgtaatgttgaaagcgcgcgttttatcgctacacgcattatcagtgccgtgaatgactatcactttatatgggaaggccgtgtgcatcgggtaggtgccagtgccgggattaccttgattgatgacaacaatcatcaggcggcagaagtgatgagccaggctgatatcgcctgttatgcctccaaaaatggtggccggggccgggtgacggtttacgaaccgcagcaagctgccgcacatagcgaacgggcggcgatgagccttgatgaacagtggcggatgattaaagagaatcagttgatgatgctcgcccacggtgtcgctagcccacggatcccggaagcgcgtaatttgtggctgattagtcttaagctctggagttgcgaaggcgagattattgatgaacaaacatttcgtcgtagcttcagcgatccggcgcttagccatgctcttgaccgccgggtattccacgaatttttccagcaggccgcaaaagcggttgccagtaaaggcataagcatctccctccccctttccgttgccggtttgagtagcgccacgctggtgaatgatctgcttgagcagctggaaaatagccctctaccaccacggttattacatctgattattccggctgaagcgattttagatcacgcagaaagcgtgcaaaaactgcggctggcgggatgtcggatagtgctcagccaggtgggccgcgatctgcaaatcttcaacagcctgaaagcgaatatggcagattacctgctacttgatggtgagttatgcgccaacgtgcagggtaatttgatggatgagatgctgattacgattattcaggggcacgctcagcgactcgggatgaaaaccatcgccgggccagtcgttttacccttagtgatggatacgctttctggcatcggcgtcgatctgatttatggtgaggtgattgccgatgcccaaccgctggatttgctggtgaatagtagttatttcgcgattaactgaggcgtgcttccccatcgcctgatgcgacgctaacgcgtcttatcatgcctacaaatcgctcattccccaggccggataaggcgctcgcaccgcatccggcgaccaacgtcatgcttcgtctggttgccagccttccgtataccagatatgcaacagcgcataagaacgccagggcttccagcgctcggcataacggcggatttgcgccggtgtcattcccggaaatcgctgtttaatcagataatcatccggcaggaaaacatctttcgcctgccagccacgcaaagcaaaataattcgccgtccagcgcccgatacccggaaaagtttgcagcgttttcatcgcctgctccacatcgcccggtattgtcattggtaaggtgccctccagcgccgcatttgccagatgaatcagcgcctctgcccgtttcaacggcatacctaacgcttttaatgcctgcgggtctgctgctgccagccgctgaggcgtcgggaagcagatatactccggaaaatcatccagccgttcgccataaagctgtgccactctggcggtcaattttgccgccatcgccacgctcaccagttggcctaaaatcgcccgcacgccctgctcaaaagcatcaacacagccgggtaaacgcaatccgggccgcgccgcgcctaacctgcccaacgcaccgttaacaatttgtgggttacattgcagatcaaacaggcggctcattttcgccagacactctgcggcaacaggttctaaacctgcacttaaatttatgtgcagagtatggcgggctatatccggaatagcagtcaccacgccgcgatattcgcccaccgccagactacgggcataataactgtccgcgaccgtttccacactgctcaccgcacgggcggcgagaaatcccaacatccagctccagtcatacggcggctgccagttcagggtatacatcgcatctccttattcatccgctttcagcataaacgttattcagacgctgcgctttgctttcatattccggttgtcgcgacggcaacatttcgctaaagtcacgccccttcttcaccggcatggggattatttcgtgtttattggttttgattacggtacagcaaactgtagtgtggcggtcatgcgtgacggtaaaccgcatttgctaaaaatggaaaacgacagcacgctgctgcctagtatgctttgcgcgccaacgcgtgaagcggtaagcgaatggctgtaccgccatcatgatgttccggcagacgacgatgaaacgcaggcgctgttacgtcgggcgattcgttataaccgcgaagaagatatcgatgttacggcgaaaagcgtgcagttcggtctttccagtctggcacagtacattgatgatccagaagaagtgtggtttgtgaaaagtccaaaaagcttcctcggtgccagcggcttaaaaccgcagcaggtagcgctgtttgaggatctggtctgcgcaatgatgttgcacattcgccagcaggcgcaggcacagctgccagaagcgattactcaggcggtgattggtcgtccgatcaacttccaggggctgggcggtgatgaagcaaacacccaggcgcaagggattctggaacgcgcggcgaagcgtgccggattcagggacgtggtattccagtacgagccggtcgcggctgggctggattacgaagccaccttgcaggaagaaaaacgggtgctggtggtggatatcggcggtggtacgactgactgtagtttgctgctgatggggccgcagtggcgtagccgtctcgatcgtgaagccagcctgctgggtcacagtggttgccgtattggcggtaacgatctggatatcgcgctggcgtttaaaaacctgatgccactgctgggtatgggtggcgaaaccgaaaaaggcatcgccctgccgatcctgccgtggtggaatgcggttgccatcaacgacgtacctgcgcagagtgatttctacagtagtgccaacggtcgtctgcttaacgatctggtacgcgatgcccgcgaaccggaaaaagtggccctgttacagaaagtctggcgtcagcgtttaagctatcgcctggtgcgtagcgcagaagagtgcaaaattgctcttagtagcgtagcggaaacccgcgccagtctgccgtttatcagcaatgaactggctacgctgattagccagcgagggctggaaagcgccctcagccagccactgacgcggattctggaacaggtgcaactggccctggataacgcccaggaaaaaccggacgttatctacctgaccggcggtagcgcccgttctccgctgattaaaaaagcgctggcagaacagttgccgggcattccgattgcaggcggcgatgactttggctccgtcaccgccgggctggcacgctgggcggaagtggtgtttcgttaattgaaaaatggctcagcagcggcttaaatctgcctgcgcctgagccagtttttctgctgcctgacgtaacggttccatcaacggcatggtccgtgctggagcatgaaggcggaatcgctgcaactctgtcgcgccgactgtcaacgcgctttccagccgatgtcgtttggcggtcattttcgccattaccgcttgtctgtctgctggcgttatcgcttcattcggcctgaacacaaaacggcgttcacagctcgctttccagtcgataaccgcctgggtcagatggtcgccaaaccctttcacttgcttaacgccacgacgggtaacatctgcggctgtttcaataccaaaagaccgtaacgccgctttacgcgcagggccaacgccgggaatagaggcaacatcaataaaaaatccctccagaaacttctgcttctgccgttcccttgcagtgtcatgaagtgctgccagagcgcgtttctcttcttccggtaacccgagaatttcgtccttcattttttcgagcatcgtccgtttggcgataaaaccttccaggccgcctacctgctggatctggcggactaaatggtcatagtccattttcgcacgattaaatgcctcacggcgttgctgaacttctgctttgtacgctttgcttgtcagactgccaataatccagatagccgccagcacaggaaccaaaataatataacgcggttctgcctgaaggccgcaaagcagcaggcttaatgcactcagtgcgatctcaagcagaatgatgtattcgcgccgtaacaggcctaaaggaagcggcctgccagtcggttggaaatgatcgggtaatggcagttgcaatgctggcggtgctacactcgccatcaccatcgcccagactttcgccagcacaaaattcccgccggtggtaatgacctcttcgccgagatcaataaaatagataacaccttgattatccagcgcacaccacgggcagtcagtcaaatgagcggggtaaacatgcattgcactaacgatacatttctttaactgttggcgtagagagtccagtgccgctacccacgctttagccgtcggacgcccggttgccacgccactttccgtgaatgcctgctgaaacatggcttcaacatcactcggtaacatgcttagcggaatagatcgtggcggcggttttaaaccacgtcgctgattatcactcgcgtaggcataacggaaatgggtaatatccgtctccagcgcattacccgcatcagagataagcggcacaccagaataaggatgccgcccaccaaacaagacgtgaaaaattagcaacgcaaggccaaaattatcgtgattttctgtgcgttcaaaaccgacaaaacttggcaaggtttgtagctctggcggcgtaaaatggctcacgccgacttcgcataaatgcagtgtgccattggcgttaatttgaaaggagtcgctatcaatcagtaccactttgctgtcgcgacctaccataaaactgttctggtttacgtcacccacgacgtgcccgtgctcgtgaaccgtagcaaaagaactagcaatattgcgcgcaacatagagtagaaaatcccacgcacaatgagggtaactctggcgacgatgtgccgggctatagatcatatgaatcggttctttaccagaaacttttggcatcataaaaccgataacttttccgcctcgtccaccgtgaagcgttgcctgcggccaggcgacataattcaacaactgcgcgtcagctgtcgcagccataaaggcaagtttgtcctgttttaaggcgggtggcggcgtgtgataaatcttggcgacgctatcgacaaactcctcgatatcataaaccgcgccttcaccacctttgcccagttcacggccaagagtggtcaattcacctgtgcttgtaaatacttttatatttgttttcataatatttcgcgggtagttatattatatttcaatgaataataacaactaaccattaaaattatttctatatggggaaaacccactcaagaataaaaatgataatgcaattttatcaggatacaattcaatttcggcctgataatgattaacttccacaggtttttgctaactttgactacaaagggattctggagaaaaaatgaaaaagatattacttatgttgagtctgctattttttactaccgcgggctttagtgaagttagcgatacgttagtgacgggaggttatgataaacaagcgatgtctgacgcgattaaacatgcgcggaaagaaaccgataaattcatcgaggttatgaataaaaaagatgccgatactttcgcagtcaaagccccgataaccgatcacggaagaaccgagcatttctggcttacggatgtcacttattctaacggcatgtttattggcgtaatcagcaatgaccctggtattgttacaaacgtagaatatggccaggagtggaaaatcaagaaagaagatattagtgactggatgtatacgcgcggggataaaatttacggcggttataccattgatcctttattggtcacctatccaaaagaagaagccgacgagctaagagcaaaattagttcgctaatcagccgttatatttattgtttaaactggcggttgaattgttgtcttcaaccgccatgagaaactcactctgcccacagcgccagtgccaacgttttatcatcatccgtacgctcgtttaccgccgggctggacaaaaactgctttaacaattcaggtaataaatcgagttgttcctgcgttgctgccgccagtccattgaaaaacggggtaaagaaaggcacatgaggagaattatccagcatatttaacgccagtcgctggataccatccgtaaatgctgcaactttgtgcgcacgcccagtgctggtgaaagtttccagtctggaaacggcatcttcgtcggtaatgaagtgcgtcatgttggcatattcacccgccatcggcgtgagaggcaattgcagaccgtgacccaaatctaccaccacgccgccatcgccaatctgcataatcaaggtgccgtcagggctactaatcagtcccagaaatgtgcaggcaaaatcgcgaaccgctaattctttggcttccgcctcggcaaaaagtcgttgacgaatggtcagtaccatatttgtggcgaggacatcattaagccccaattccccgccctgcactttttggctcatataagccatcgcttcattgacggcgagcatcgcgccttcgccaccctggctgacactgcctgcgccatcagcgacaaatacgctcaataatggctgctggtcatttaaccaggcaatctgcatctggcaggcatcctgacaaggcaagtccgcgctgatgtggctcgttccaacggtacttgcatagaccagacgccagctcacacactcgtccagccttttggcgcttccagcacaacttccgttcccggcgtggagcgggaaacgctacgcaggctactggataaccagctaaacagttcacggaattgtaatccttgcagaggcaaaggctgacgaacgctaatttgtgccagcgtcttcatatccgccccctgaacaccgatggaaaagaaagcaaaccttttatcttcttccccccgaaacactttgttggctgcagcctgccactcatcggttggtgcaccatcggtaatcaggaaaatccacgggcgataatagctaataccatttgcacgatactcacgtttccgctcctctaccatatccagggctttggtaatggccgcacccattggtgtatcgccctgggcaaacaggatgggcggaaaaaaattagcggcgctggtaaagggttgttccacatgcaccgggccgaacgtcacaatgccgagttccactctttttaaagccagcggatcagcaagcagttcatcacgaaaggtaaccaatccggcgttaagttcattaataggtctaccgttcatagaaccagaaacatccagcagcaaaatgcaggggcaacgtggttccgggttactggcaaaatcgctggtggcaaacgtgatttgttcgctcataagaaatcctttcttagagaattatcgaggtccggtatcataccgactgcaataatgaaataagagcaaacgaagaaactttcagaattaggcccggcggcgcagaaaattttgctattcgcctcgcaagaacggagagccgtcgattgacactaagggcggagtgacataatttcaggagtgagggttagggagaggtttccccctccccctggtgttcttagtaagcctggaagctaatcactaagagtatcaccagtatgatgacgtgcttcatcataaccctttccttattaaaagccctcttctccgggagaggctttcccgtttcagcgtcccgctgaaatcatcggcttacctcctttcgccctgaatgcagtctatcgctaacgcgtgaataaaatagtttcctctgtgattattgcgtaacgactcgcaaagaatatttgctggcaggatcgcagactacaaagcctgcggattgacaatcttatcgtgaaggcatactttcaggagtgagggtagagcggggtttcccccgccctggtagtcttagtaagcggggaagcttatgactaagagcaccacgatgatgagtagcttcatcatgaccctttccttatttatggccccttcctcgggaggggctttcccgtttcagcgtcccgctgaaatcgtcggcttacctcctttcgccatgcaagcagtctatcgctaacgcgtagataaaatagtttcctgtgttattactggatgcgtgctcgcaaatgtgcccgtcattcagacgattccagacagtgtttcataattcctccatttttctcccttattggctggctacactagtatcattccgcgaaacgtttcaggaagagaaactcttaacgatgaaaggtagttataaatcccgttgggtaatcgtaatcgtggtggttatcgccgccatcgccgcattctggttctggcaaggccgcaatgactcccggagtgcagccccaggggcgacgaaacaagcgcagcaaagcccagcgggtggtcgacgtggtatgcgttccggcccattagccccggttcaggcggcgaccgccgtagaacaggcagttccgcgttacctcaccgggcttggcaccattaccgccgctaataccgttacggtgcgcagccgcgtggacggccaactgatagcgttacatttccaggaaggccagcaggtcaaagcaggcgatttactggcagaaattgaccccagccagttcaaagttgcattagcacaagcccagggccaactggcaaaagataaagccacgcttgccaacgcccgccgtgacctggcgcgttatcaacaactggcaaaaaccaatctcgtttcccgccaggagctggatgcccaacaggcgctggtcagtgaaaccgaaggcaccattaaggctgatgaagcaagcgttgccagcgcgcagctgcaactcgactggagccggattaccgcaccagtcgatggtcgcgttggtctcaagcaggttgatgttggtaaccaaatctccagtggtgataccaccgggatcgtggtgatcacccagacgcatcctatcgatttagtctttaccctgccggaaagcgatatcgctaccgtagtgcaggcgcagaaagccggaaaaccgctggtggtagaagcctgggatcgcaccaacagcaagaaattaagtgaaggcacgctgttaagtctagataaccaaatcgatgccactaccggtacgattaaagtgaaagcacgctttaataatcaggatgatgcgctgtttcccaatcagtttgttaacgcgcgcatgttagtcgacaccgaacaaaacgccgtagtgatcccaacagccgccctgcaaatgggcaatgaaggccattttgtctgggtgctgaatagcgaaaacaaggtcagcaaacatctggtgacgccgggcattcaggacagtcagaaagtggtgatccgtgcaggtatttctgcgggcgatcgcgtggtgacagacggcattgatcgcctgaccgaaggggcgaaagtggaagtggtggaagcccagagcgccactactccggaagagaaagccaccagccgcgaatacgcgaaaaaaggagcacgctcctgatgcaggtgttacccccgagcagcacaggcggcccgagccgcctgtttattatgcgtcctgtggccaccacgctgctgatggtggcgatcttactcgccgggattatcggttatcgcgccctgcccgttagcgcgctgccggaagtggactatccgaccattcaggtggtcacgctctacccaggtgccagcccggatgtcatgacctctgccgttaccgcgccgctagaacgccagttcgggcagatgtctggcctgaaacagatgagcagccaaagttccggcggtgcgagtgttatcactttgcagttccagctaacattaccgctcgatgtcgccgagcaggaagtgcaggccgcgattaacgctgcgaccaacttgttgccgagcgatctgcctaacccgccggtttacagcaaagtgaacccggcagatccgccgatcatgacgctcgccgtcaccagtaccgccatgccgatgacgcaagtggaagatatggtggaaacccgcgtcgcgcagaaaatcagccagatttccggcgtcggcctggtgacgctttccggcggtcagcgtccggctgttcgcgtcaaacttaacgctcaggcgattgccgccctcggcctgaccagcgaaaccgtgcgcaccgccattaccggcgctaacgttaacagcgcaaaaggtagcctcgacggcccttcccgtgcggtcacgctttccgcgaacgaccagatgcaatccgccgaagagtatcgccagctaatcatcgcctaccagaacggcgcgccaattcgtctgggcgatgtcgcaactgtagagcaaggtgcagaaaacagctggctcggcgcgtgggcgaacaaagaacaggccattgtgatgaatgttcagcgccagcccggtgctaacattatctccaccgccgacagcattcggcagatgctgccacagctcactgagagtctgccgaaaagcgtgaaggtgacagtgctttccgatcgcaccaccaatatccgcgcatccgtcgatgatactcagtttgaattgatgatggctatcgcgctggtagtcatgattatctacctgtttttgcgcaatattccggcgaccatcattcccggtgttgctgtaccgctgagcttaatcggcactttcgcggttatggtgtttctcgattttagtatcaataacctgacactgatggcgttaactatcgccaccggattcgtggtcgatgacgccatcgtggtgatcgaaaacatttcccgctatatcgaaaaaggcgaaaaaccgttggcggcggcgctcaagggcgcaggtgaaatcggctttaccattatcagcctgaccttcagtctgattgcggtgttgatcccactgctgtttatgggcgatatcgtcgggcgactgttccgcgaatttgctattaccctggcggtagcgattttgatcagtgcggtggtgagcctgaccctgacaccgatgatgtgcgcgcggatgctcagccaggagagcttgcgtaaacagaaccgcttctcccgtgccagcgaaaaaatgttcgacaggataatcgccgcctatggtcgtggactggcgaaagtgctgaatcatccgtggctgaccttaagcgtggcactcagcacgctgctgcttagcgtgctgctgtgggtgttcattccgaaaggtttcttcccggtacaggacaatggcattattcagggcactttgcaggcaccgcaatccagctcctttgccaatatggcccagcgacaacgccaggtcgcggacgtgattttgcaggatccggcagtgcaaagcctgaccagttttgttggcgttgatggcactaacccgagcctgaacagtgcacgtttacaaatcaacctcaaaccgttggatgaacgtgatgatcgggtgcaaaaagtcatcgcccgtctgcaaacggcggtagataaagtgccgggcgtcgatctcttcctgcaaccaacgcaggatctgactattgatactcaggtcagccgcacccagtaccagtttaccttgcaggccacgagtctggatgcgctcagtacctgggtgccacagttgatggaaaaactccagcaactgccacagctttctgatgtctccagcgactggcaggacaaagggctggtggcgtatgtcaatgttgatcgcgacagcgccagccgtctggggatcagcatggcggatgtcgataacgccctgtacaacgcgtttggtcagcggctgatttccactatttatactcaggccaaccagtatcgcgtggtgctggagcacaacaccgaaaataccccaggcctcgcggcgctggataccattcgcctgaccagcagcgacggcggcgtggtgccgctaagcagtattgccaaaattgagcagcgttttgcgccgctctccatcaaccatctggatcagttcccggtaacgaccatctcctttaacgtgccggataactatagcctgggcgatgcggtgcaggcgattatggacaccgaaaagacgctgaatctgccggtggatatcaccacgcagttccagggcagcaccctcgccttccagagcgcgctgggcagcactgtctggctgattgtcgcggcggtggtggcgatgtatatcgtgctcggcattctgtacgagagctttattcacccgatcaccattctcagcacgctacccaccgcaggggttggcgcactgctggcgttgctgattgctggtagcgaactggatgtgattgcgattatcggcattattttgctgatcggtatcgtgaagaagaacgccatcatgatgatcgacttcgcgctggctgctgagcgcgagcaaggcatgagcccgcgcgaggcaatctaccaggcttgtctgttgcgttttcgtccgatcctgatgaccactctggcggctctgcttggcgcgctgccgctgatgttgagtaccggggtcggcgcggaactgcgtcgtccgttaggtatcggcatggtcggcggtctgattgtcagccaggtgctgacgctgtttaccacgccggtgatttatttgctgttcgaccgcctggcattgtggaccaaaagccgctttgcccgtcatgaagaggaggcgtaagtgaagttttttgccctcttcatttaccgcccggtggcgacgattttactgagcgttgccattaccctgtgcggcatactgggcttccgtatgctgccggtcgccccgctgccgcaggtcgattttccggtgattatcgtcagcgccagcctgcccggtgcgagtccagaaacaatggcgtcttccgttgccacgccgctggagcgcagtcttgggcgcattgccggagtcagtgaaatgacctccagcagtagcctcggcagcacgcgtattattttgcagtttgattttgaccgggatatcaacggcgcagcgcgtgatgtgcaggcggcgatcaacgctgcacaaagtttgctgcccagtgggatgcccagccgcccgacctatcgcaaagcgaacccgagcgatgcgccaattatgatcctcacgctgacgtccgatacttatagccagggtgaactgtacgatttcgccagcacgcagctggctccgacgattagccaaatcgacggtgttggtgatgtcgatgtcggaggcagcagtctgcccgccgtacgcgtcgggctgaatccgcaggcgctgtttaatcagggcgtgagcctggacgacgtacgcaccgccgtcagcaatgccaacgtgcgtaaaccgcagggcgcgctggaagatggcactcaccgctggcagatccagaccaatgatgagctaaaaaccgccgctgaatatcagccgttgattattcactacaacaacggcggcgcggttcgtctgggcgatgtggcgacggtgaccgacagtgtgcaggatgtgcgcaacgccgggatgaccaacgccaaaccggctattttactgatgatccgcaaactgccggaagccaatattatccagacggttgacagcatccgggcaaaattaccggagttgcaggaaaccattccggcggcgattgatctgcaaattgcccaggatcgctcccccaccattcgcgccagcctggaagaagtcgagcaaacgctgattatcagcgtggcgctggtgattctggtggtgtttttattcctgcgcagcggtcgcgccactattattcccgccgttagcgtgccggttagcctgattggtacgtttgcggcgatgtacctgtgcggattcagtctcaataaccttagcttaatggcgctcaccatcgctactggtttcgtggtggatgacgccatcgtggtgctggaaaacattgcacgtcatctggaagcgggaatgaaaccgttgcaagccgcactgcaaggtactcgcgaagtcggttttacggtgctgagcatgagtctgagtctggtggcggtgttcctgccgctgctgttgatgggcggattgccgggccgactgttacgcgaatttgccgtgacgctttctgtcgccattggtataagcttgctggtttctctgacattaacgccaatgatgtgtggctggatgctgaaagccagcaagccgcgcgagcaaaagcgactgcgtggttttggtcgcatgttggtagccctgcaacaaggctacggcaagagtctaaaatgggtgctcaatcatacccgtctggtgggcgtggtgctgcttggcaccattgcgctgaatatctggctgtatatcagcatcccgaaaaccttcttcccggagcaggacactggcgtgttgatgggcgggattcaggcggatcagagtattagctttcaggcgatgcgcggtaagttgcaggatttcatgaaaattatccgtgacgatccggcagtggataatgtcaccggctttacaggcggtagccgagtgaacagcgggatgatgtttatcaccctcaagccacgcgacgaacgcagcgaaacggcgcagcaaattatcgaccgtctgcgcgtaaaactggcgaaagaaccgggggcgaatctgttcctgatggcggtacaggatattcgcgttggtgggcgtcagagcaacgccagctaccagtacacgttgttatccgacgacctggcggcactgcgagaatgggagccgaaaatccgcaaaaaactggcgacgttgccggaactggcggacgtgaactccgatcagcaggataacggcgcggagatgaatctggtttacgaccgcgacaccatggcacggctgggaatcgacgtacaagccgccaacagtctgttaaataacgccttcggtcagcggcaaatcagcaccatttaccagccgatgaaccagtataaagtggtgatggaagtggatccgcgctatacccaggacatcagtgcgctggaaaaaatgttcgttatcaataacgaaggcaaagcgatcccgctgagctatttcgctaaatggcaaccggcgaatgccccactaagcgtgaatcatcagggattaagcgcggccagcaccattagctttaacctgccgaccggaaaaagcctcagcgacgccagtgcggcgatcgatcgcgcaatgacccagcttggtgtgcctagcacggtgcgcggcagttttgccggcacggcgcaggtgttccaggagacgatgaacagccaggtgatcctgattatcgccgccatcgccacggtgtatatcgtgctgggtatcctttacgagagttacgtacatccgctgacgattctctccaccctgcccagcgcgggcgttggagcgctgttggcgctggagctgttcaatgccccgttcagcctaatcgccctgatagggatcatgctattaatcggcatcgtgaagaaaaacgccattatgatggtcgattttgcgcttgaagcccaacggcacggtaacctgacgccgcaggaagctattttccaggcctgtctgctgcgttttcgcccgattatgatgactaccctggcggcgctgtttggtgcgctgccgctggtattgagcggcggcgacggcagcgagctgcggcaacccctggggatcaccattgtcggcggactggtaatgagccagctccttacgctgtataccacgccggtggtgtatctctttttcgaccgtctgcggctgcgttttagccgtaaacctaaacaaacggtaaccgagtaaatgacagatcttcccgacagcacccgttggcaattgtggattgtggctttcggcttctttatgcagagcctggacaccaccatcgtaaacaccgcccttcccagtatggcgcaaagcctcggggaaagtccgttgcatatgcacatggtcattgtctcttatgtgctgaccgtggcggtgatgctgcccgccagcggctggctggcggacaaagtcggcgtgcgcaatattttctttaccgccatcgtgctgtttactctcggtagtctgttttgcgcgctttccggcacgctgaacgaactgttgctggcacgcgcgttacagggcgttggcggcgcgatgatggtgccggtcggcagattgacggtgatgaaaatcgtaccgcgcgagcaatatatggcggcgatgacctttgtcacgttacccggtcaggtcggtccgctgctcggtccggcgctcggcggtctgctggtggagtacgcaagctggcactggatctttttgatcaacattccggtggggattatcggtgcgatcgccacattgctgttaatgccgaactacaccatgcagacgcggcgctttgatctctccggatttttattgctggcggttggcatggcggtattaaccctggcgctggacggcagtaaaggtacaggtttaagcccgctgacgattgcaggcctggtcgcagttggcgtggtggcactggtgctttatctgctgcacgccagaaataacaaccgtgccctgttcagtctgaaactgttccgtactcgtacctttagcctgggcctggcggggagctttgccggacgtattggcagtggcatgttgccctttatgacaccggttttcctgcaaattggcctcggtttcagcccgtttcatgccggactgatgatgatcccgatggtgcttggcagcatgggaatgaagcgaattgtggtacaggtggtgaatcgctttggttatcgtcgggtactggtagcgaccacgctgggtctgagcctggtcaccctgttgtttatgactaccgccctgctgggctggtactacgttttgccgttcgtcctgtttttacaagggatggtcaacagcacgcgtttctcctccatgaacaccctgacgctgaaagatctcccggacaatctggcgagcagcggcaacagcctgctgagcatgattatgcaattgagcatgagtatcggcgtcactatcgccgggctgttgctgggactttttggtagtcagcatgtcagcgtcgacagcggcaccacacaaaccgtctttatgtacacctggcttagcatggcgttgatcatcgcccttccggcgttcatctttgccagagtgccgaacgatacgcatcaaaatgtagctattagccggcgaaaaaggagcgcgcaatgaagttctggcgacccggtattaccggcaaactgtttctggcgattttcgccacctgcattgtcttgctgatcagtatgcactgggcggtgcgtatcagttttgagcgtggctttattgattacatcaagcatggtaatgaacagcgattacaactgttaagtgatgcgcttggcgagcagtatgcgcagcatggcaactggcgcttcctgcgcaacaatgatcgctttgtctttcagatcctgcgtagttttgaacacgataatagcgaagataaacccggcccgggtatgccaccgcacggctggcgtacccagttctgggtggttgatcaaaacaacaaagtgctggttggtccgcgagcgccgattccacctgacggtacacggcgacccattctggtcaacggtgcggaagttggcgcggtgatcgcctcccccgttgagcggttaacgcgcaatactgatatcaatttcgataaacaacagcggcaaaccagctggttgattgtcgccctggcaacgttactcgcggcacttgccacttttctgctggcgcgcggtttactggcaccggtaaaacgacttgtcgatggcacgcacaaactggcggcgggcgatttcactacccgcgtaacgcccaccagtgaagatgaactgggcaaactggcgcaagacttcaaccagcttgccagcacactggagaaaaaccagcaaatgcggcgcgattttatggccgatatttctcacgaactgcgtacgccattagcggtgctgcgcggtgaactggaagccattcaggatggcgtgcgtaaattcacgccggagacggtggcgtctttacaggcggaggtcggtacactgaccaaactggttgacgatctccatcagttgagcatgtctgatgaaggcgctctcgcctatcaaaaagcaccggtagatttgatcccactgctggaagtggcgggcggcgcatttcgcgaacgattcgccagtcgtggcctgaaactgcaattttccctgccagacagtattaccgtatttggcgatcgcgaccgtttaatgcagttattcaataacttactggaaaacagcctgcgctacactgacagcggcggcagcctgcaaatctctgccgggcagcgcgacaaaacggtgcgcctgacctttgccgacagtgcgccaggtgtcagtgacgatcagctacaaaaattgtttgaacgtttttatcgcaccgaaggttcccgcaaccgtgccagcggcggttccgggctggggctggcgatttgcctgaacattgttgaagcacataatggtcgcattattgctgcccatagcccttttggcggggtaagcattacagtagagttaccgctggaacgggatttacagagagaagtatgaccgagttaccaatcgacgaaaacacaccgcgtattttgatcgtggaagatgaaccgaagctggggcagttgctcattgattatctgcgtgctgcgagctatgcgccgacgcttatcagccacggcgatcaggtactgccgtatgtgcgccagacaccaccggatctgatcctgttagatctgatgctccctggcaccgatggcctgacgctgtgccgggaaattcgtcgtttttctgacattccgatcgtgatggtgacggcaaaaatcgaagagatcgatcgcctgctggggctggagattggcgcagatgattatatctgtaagccgtacagcccacgggaagtggtagcgcgcgtcaaaaccattttgcgccgttgcaaaccgcagcgcgagttgcagcaacaggatgctgaaagcccgttgattatcgacgaaggtcgttttcaggctagttggcgcggtaaaatgcttgacctgacgcctgcggaatttcgtctgctgaaaacgctctctcacgaaccaggaaaagtgttctcccgcgagcaattgctcaatcatctttatgacgactaccgcgtagtaaccgaccgcaccatcgacagccacattaaaaacctgcgccgcaagctggaatctctcgacgccgaacagagttttatccgcgccgtttatggcgtcggttaccgctgggaagccgacgcctgccgcatcgtttaattttagcgacattattttgttagccggagatggcgttcagaccagatccggcaacattatcccacgcatggtcagcaaactgacattatctctccgccctggcaggcatcagaaaatcgctcatactttaatcggtaaacagcacctttagaatcctgtcgtttgttttcgatttcaaaatataatgaaattatttgtttttaaatatcgagataacgatcacaaaaacgacaatatgaaaattattcgaggagtgaaaggcaaaaaaacggcctcccgatagggaagccgtagcaaagtgcgcgtgtttttatgccggatgcggtgtaaacatacgtggcagtgctatgtaggcatgataagacgcttcagcgtcgcatcaggcataggttgccggatgcagcgtaaacgccttatccgtcctacggggtggtgttgttcgtataaggcgtatcaggcgatagtaattttgctatcgagataaacgtcctgcacggcgttaatcagtttcacgccgtcagccatgcttttcttgaacgctttacgtccaagaatcagccccattccgcctgcgcgtttgttgataaccgcagtacgcactgcatcgctgaggtcagtttcaccgcccgcagcaccgccggagtttatcaacccagcccgacccatatagcagttagctaactgataacgcaccagatcaatcgggttttcgctggtcaatttgctgtaaacacgatcgtcggtgtaaccgtaattaattgctttatagccgccgttattttccgccattttttgtttgacgatatctgcaccgatggttgccgccagatggtttgcctgaccggtcaggtcggcggaaacatggtaatcaacgccatctttcttaaaggcggagttacgcaaataggcccacagcactgtcaccatacccagctcgtgcgcacgttcaaaagccgcagaaatttcttcaatctggcgacgactctcttcgctgccaaaatagatagtcgcaccaaccgcaaccgcgcccatgttgaacgcctgctccacgctggcatacagcgtttgatcgtaggtattcgggtaacttagcgtctcgttgtgattaagtttgacgaggaatggaatgcgatgcgcataacgccggcttacgctcgccagcacgccgtaagtactcgccacacagttacagcccgcttcgatcgccagttcaacaatgtttttcgggtcaaagtagagcgggttagcagcaaaactagctccggcagagtgctcaacgccctggtcaaccggcagaatagaaagatatcctgtgccagccagacgcccggtgttgtacaacgtctgcatattacgtaacaccgctggcgggcgattattgtcaatcattacgcggtctacgtagtcatgtccggggagataaagctggtcagaaggaattgtcatacaacggtgctgtaaaaggttgtcggcgtctttgccaagcaactgcgcaatatctgtcattactatgctcccgtaaattccgattggatatcggctatggattgtcctggcccgccttttgcgggcaatcataatcctggtcgttacgggcgagtttttccatcttttggatgttttttcagcgttttctgttggctcgattcatcagaaaaaatgttagcgcggtcaagttttcaccgcaaaggtatttaaaaggtattattaagtggtattgtcatcgcgtaccttacattacctgtcatgaaggaattaaaagatgaaaacaacagcaaagctgagcttcatgatgtttgttgaatggtttatctggggcgcgtggtttgtgccattgtggttgtggttaagtaaaagcggttttagtgccggagaaattggctggagctatgcctgtaccgccattgcggcgatcctgagcccaattctggttggctccatcactgaccgctttttcagcgcgcaaaaagtgctggcggtattgatgttcgcaggcgcgctgctgatgtatttcgctgcgcaacagaccacttttgccgggttcttcccgttactgctggcctacagcctaacctatatgccgaccattgcgctgactaacagcatcgcttttgccaacgtgccggatgttgagcgtgatttcccgcgcattcgtgtgatgggcactatcggctggattgcctccggtctggcatgtggtttcttgccgcaaatactggggtatgccgatatcagtccgactaacatcccgctgctgattaccgccggaagttctgctctgctcggtgtgtttgcgtttttcctgcccgacacgccaccaaaaagcaccggcaaaatggatattaaagtcatgctcggcctggatgcgctgatcctgctgcgcgataaaaacttcctcgtctttttcttctgtagtttcctgtttgcgatgccactagcgttctattacatctttgccaacggttatctgaccgaagttggcatgaaaaacgccaccggctggatgacgctcggccagttctctgaaatcttctttatgctggcattgccgtttttcactaaacgctttggtatcaaaaaggtattattgcttggtctggtcaccgctgcgatccgctatggcttctttatttacggtagtgcggatgaatatttcacctacgcgttactgttcctcggtattttgcttcacggcgtaagttacgatttttactacgttaccgcttacatctatgtcgataaaaaagcccccgtgcatatgcgtaccgctgcgcaggggctgatcacgctctgctgccagggcttcggcagtttgctcggctatcgtcttggcggtgtgatgatggaaaagatgttcgcttatcaggaaccggtaaacggactgactttcaactggtccgggatgtggactttcggcgcggtgatgattgccattatcgccgtgctgttcatgatttttttccgcgaatccgacaacgaaattacggctatcaaggtcgatgatcgcgatattgcgttgacacaaggggaagttaaatgaaaacagaacgtattctcggtgctctttatgggcaggcgttaggggatgcgatggggatgccctccgagctttggccacgcagccgcgttaaagcacactttggctggattgaccgttttcttcctggaccaaaggagaataacgcggcctgttattttaaccgcgccgaattcaccgacgataccagcatggcgctgtgtctggcggatgcgttactggaacgtgaaggcaagatcgatccggatctgattgggcgtaatattctcgactgggcgctgcgtttcgacgcctttaacaaaaacgtactaggtccgaccagcaagattgcgcttaacgccattcgcgacggtaaacccgttgctgaactggaaaacaacggcgtgaccaacggcgcagcgatgcgcgtcagcccattaggttgtttgcttccggcgcgtgatgttgattcctttattgatgatgtagcgctggcgtccagcccgacccataaatccgatctggcggttgcaggcgcggtagtcatcgcatgggcgatttctcgtgccattgacggagaaagctggagtgcgattgttgattccctgcctagtattgcgcgacatgcacagcaaaaacgcatcactacgttcagcgccagtctggcggcgcggctggagattgcgctgaaaattgtgcgcaatgccgacggcaccgaatccgccagcgaacagctttaccaggtcgttggcgcaggtaccagcactattgagtccgttccgtgcgccattgcgctggttgaactggcacaaaccgacccgaatcgctgcgccgtcctgtgcgctaaccttggcggcgacacagacaccatcggtgctatggcgacggcaatttgcggcgcgttgcatggcgttaacgctatcgatcctgcgttaaaggcggaactggatgcggtaaatcagcttgatttcaaccgctatgccacagcgctggcgaaatatcgtcaacaacgggaggcggtatgagcggcgctcgattacacacgctgctgcctgaattaaccacgcgtcagagcgtgatggtcgtcggcgcggcggtcattgacgtgatcgccgacgcttatgccctcccctggcgtgggtgcgatatcgaactgaaacagcagagcgttaacgttggcggctgcgcactgaatattgccgtggcgttaaagcgcctcggcatcgaagcgggtaatgccttgccgctcggtcagggcgtgtgggcggagatgattcgcaaccggatggcaaaagagggcttaatcagcctgatcgataacgccgaaggtgataacggctggtgtctggcgctggttgagccggatggcgaacgcacttttatgagtttcagcggtgttgaaaatcagtggaatcgccagtggctggcgcgattaaccgttgcgcctggcagcctgctctatttttccggttatcaactggccagcccctgcggcgaattgttagtggaatggctggaagagctgcaagacgtgacgccgtttatcgattttggcccacgtattggcgatatcccggatgcattactggcgcggatcatggcctgtcgacctttagtgagcctcaatcgtcaagaggctgagattgccgccgaacgttttgctttatccgcagagataacaacacttggcaagcaatggcaggagaaatttgccgcgccgttgatcgttcgtctcgataaagaaggcgcatggtatttcagcaacgacgcttctggctgcattccggcatttccaacgcaagttgtcgacaccattggggcgggcgacagtcatgccggtggcgtacttgccgggctggcctctggtctgccactggcggatgccgtattactgggcaatgcagtggcgagctgggttgtcgggcatcggggcggtgattgtgcgccaacgcgcgaggaactactcctcgcacacaaaaacgtataattactcctcgcacacaaaaacgtatagatcgctgcgacagtggctaatgctgtactcaataggccgttgctgttggtcaagcgccacttgcttgatcaccagcaccggtattttgctatctaactgaatatgactctgaaactcggcatccggcatccgggcgctaacgcgggaacgcgtacgttgtgggtaaatgtgctggctgcggaaatagtcataaagactaatcccgatggcatcaacatcatgaattaaatgcgccggaacccagctttcctcaatgcttaccgcttcttcatcgacatagcgaatacgcttaagcaaaaagacatcacttcctgcttcgaccgccagctgctgcgcgacttcttcgggacatttcacgacacgcttgttaacccatagcgtatcgggctttttcccgcgcaataccacctgctgagaaaaacctcgcgcttctttcaagctgtattcgaagatgttgttgatctgcgtgccgtaaccgcggctacgcgtcaccacaccctcttcttccagcgcctgcatcgccttgcgcaccgtaatgcggctaacgccggttaactgacttaaatcacgctcaccgggcaaaatattgccatgctccagcaccccgctgcgcacggcattttttaccgtttcggcaaacttaatataaagcggcgtgttatccgccgctaaaatacgctcgttcagttgggcaatcagctgggtatgcgcttgttccatttgtctttttcctgccggggagtctggtgggagtatatcactgcttcttatttaaggcgtttctttaatcccatcaacgaatgcctgcaactcctccaccgtgccattaaatacattaaaatccaccggaccattgatgccatctacctgtccacggtcggaatgctgccagaagcgccaggccattccgtcattgtccggacgacgttgatagtagtgagccacccaccacggatattcattgaaatagcccgccagattggtgtgataaaaaacggctccactgtaaataatcggctttttccccgtacttttttcgaccatttttagccactgacttacccgcttgcgtaattcttttgcgcttaattttccccgttcttctacgtccagcacggcagggaaatcgccttgactgaaatccaccgtttgcagaaataatctcgcctgaacactagcggatacgctcggggagaaataatgatacgccccacgcagcaggccattttcgcggcttagttgccagttacggctaaaataggggtccaccagcttttcgccttccgtcgccttaataaaagcaaactgtaagcggataccattgtcgcgcatttttgccacccgctgccagtcgatccgctcctgccagcggctaacatctattccgtgaatggtgtaactggcaggaatgcgaatagcgaaagatttaaccgggcgataaccgtagaagtggatgtagtctgtaatctgaactgctgtgctatagaaaaaattcaccgtctgacgcggataaattgcaacgatggaaattagcccaagagcgcataatagagaggtgagtttttttcgactggtaattcttagctgcattggtttcatccctgaatgtcagtgccaaaggctgacaataaccaaagcagctatagtacggtgctcaccaccaggcgtggaagtggtgaaccggaccaataccgtgaccaacttccagcgtgtcggcctgggctaacgcgctactaagccagctttttgcctcctgtacggtgtcagcccagtttgtatggcgcgggcgtagtgcagccaacgccgcagagagtgtacaaccagtgccgtgggtgtttttggtcataatgcgcggtgcggtaaaccgttgttcaccctcgcgggtaaacagccagtccgggctttgctcatcatccagatgaccacctttcattagcactgcgccacagcccatcgccaacaggcttcgcccttgttccagcatttcctgttcggtgcgcgcgtgtggcgcgtcgagcaaggcggcagcttcgggcaagtttggcgttattaaactaacctgtggcaataatcgactgcgcagcgtagcaaccgcgctaggactaagcagcgggtcgccgctttttgccagcataacggtgtcgagtaccacgttttggatctgataacgttgcaaccgttctgccaccgcttcaacaatatcggtttccgccagcataccgattttagtggtatcgattcgcacatcgctgaacacgctatcgagctgggcggcgacaaaatcaggctcaatgcgatacacgctctgtacgccacgggtattttgcgccaccagtgcagtaataacactgcaaccataagcgccaagtgcgctgaaggttttaagatcggcctgaatccccgcaccaccactcggatcagtaccggcaatcgtcagagcgttaattcgtttcatgcctgcacctcctgcgtcaattgccagagcgcatcaaggaaatgtggaacaaaactgcctggcccctcgcttctggcgactgcgcgttctccggcttgtttcatccagtgacaggcagatgcgacattttccagcgtatcgcctggtaacgcacagcaggcagcgacaaccgcgcttaatgcacagccagttcctaccactttggtcattaacggatcaccaccgtgaataccaatgatacgatgtccatcggtaacataatccatctcgccagtgaccacgacgattgcgccagtttcccgtgccagtgtttgtgcagcgggtatcgcgttagctgcggcgtcagtggtatccactccccgtccgccattagcaatgccagctaatgccatgatttcgctagcattaccacgtatcgctgccggtttaaaagataaaagttcatgacaaaaatggcggcgataatcgagcgcacccaccgctactggatcaagcgtccagggtgtttgagagctttttgcttgctcaacggcagcacgcatcgcctgagcgcgtggctgcgtcagtgtgccaacgttaatcaacaaggcactggcgatagccgcaaactgactggcctcttcggtttcgataaccatcgctgggcttgcaccgagcgccagcaaggtattggcggtaaaggtttgcaccacatcattggtcatgcagtgcacaagaggggaatgttggtgaaaaaggtgtaacgcgtgcgcagattgcgcactacccagcaggtcgacttgcatagtttgctcctgccataacgtgaagaagcaatgacctggtggtccgtgacttccctacgctggcattatccagatcaggtgatacgggtatttctcagccttcacgcagaagggcaccccgagtcgtttggttgcgatgataaatcgcagaggaggatggtaatgtccagcgcacgcgttgtaaacgaggaaaaacggcagttttacaatcgcgttaataaattatttgatataactatccagcaccttcagaacgacatccagatcttcttcacgttttagctcatccccctggtgaacgatgtgttccgtcagatgacctttaatcacttcccgcatcagaccgtttaccgcgccacggatagcagcaatctgttgtaaaactgcagcgcattcgtgcggctcgtcgagcattttcttgagcgccacgacctggccctgaatcttactggcacgcgctttcagtttctgtttatcacggattgtatgagacatggcaacacctggttaacaagaatatgaaaaatcatagcactattaatctactggggggtagtatcaggtactgggggggagtagaatcagattgccgaattaatactaagaattattatcatgaccgaatttacaactcttcttcagcaaggaaacgcctggttcttcatccccagcgccatcttacttggtgcgcttcatggcctggaaccagggcacagtaaaacgatgatggcggcgtttatcatcgccatcaaaggcaccattaaacaagcggtgatgctcggactggcagcaactattagccataccgcagtggtctggttaattgcctttggcgggatggtgatcagcaagcgctttactgctcaaagtgcagaaccgtggctccagctgatttccgcagtgatcattattagcaccgcgttctggatgttctggcgtacctggcgcggcgaacgcaactggctggagaatatgcacgggcatgattatgagcatcatcatcacgatcacgaacatcaccacgaccatggacatcatcaccatcacgaacatggcgagtatcaggatgcccatgcacgagcccatgccaatgacattaaacgacgctttgatggtagagaggtcaccaactggcaaattttgttatttggcttaaccggtggccttatcccctgcccggcagcaattaccgtgctgttgatatgcattcagttgaaagccctgacactgggcgcaacactggtcgtcagtttcagcattggcctggcgttaacgcttgtcaccgtaggcgttggcgcagcaatcagcgttcagcaggtcgcaaaacgctggagcggatttaacactctcgctaaacgcgccccctatttttccagtctgttgattggcttagtcggtgtgtatatgggcgtacatggcttcatgggcataatgcgataactcaatcctttaggcttgcatgttatcttcagcccaggatgattcttaaatcagctatttccgctgactctctgctcgctaaggatgcttttagggcatcctttcatttacactttttacgaaatcatgggatcactaacaaaatatcgcttgtcagttatattgtatggcaggaaagatatgcgactgatattacagatccccaaagtggagagtttatgaccattaaaaataagatgttgctgggtgcgcttttgctggttaccagtgccgcctgggccgcaccagccaccgcgggtagcaccaataccagcggaatttctaagtatgagttaagtagtttcattgctgactttaagcatttcaaaccaggggacaccgtaccagaaatgtaccgtaccgatgagtacaacattaagcagtggcagttgcgtaacctgcccgcgcctgatgccgggacgcactggacctatatgggtggcgcgtacgtgttgatcagcgacaccgacggtaaaatcattaaagcctacgacggtgagattttttatcatcgctaaaaaaagccccctcatcatgagggggaaatgcagacaccttgttattttttattattagccacttgctcgtcttgcttgttattagtcgtatttcacgttgattaatgcggttgcctccagtgcgccagatttaactttgtttgtatcgtagacgtagtaactggctgttatcggaatactaaccgttgtatctgtaagtttactcttcgccgcaacttcctttaaatttgtatatcctttactgctgttagtgatatttaaaagtgtgactgggctaccattactttcaagaataaatcctacgccattatcttccgcacctttcagtattgtgttgctgttggttaacaagtcagaactacttaaatacacctgcattttccgacttgtttgattttgttgacctaataaatttttacaacgcagaataatatccccttgtttactatttattgttgctttgttacctgtggctggtaattgactaacgggaatactgtctaaagtaattaataaatcgtccggtttgcaggttgtggttatcgggttgtaactcaatgtcagattaaaggaatagacacctgcattttgtgccaatgcatttctgtagctatttacacatgcatcccaactcttgccacctaataaacacagtagaaattgtactgcggcactcccgcgtgtgctactactagcactggataatgtcgcaacaccattaatcatcacactaccgccgccccccgcagaaacattcacttttgcattactggccgcaggtgtcaccgtaacactataaccactggtgaaactggtctgattattactcaacgtgatgttgtttttattggtccattcaaaatgtaaatttaattttatggtatcgttataaagtccaacaataatatcgctcgggctcataggggtgatagtatttgtacttacgcaactgctatcattaaaattatgctcatatgtcgccatttgtgtttgagtaagtgcaaaatccccctgaacaaccaagttgtgctgaacagataactcactataacatgccgcatagctcacaggcataaccatcatcattaatataaatagcattatgcgaatttccatagaaccacctgactattactggcaaatataatttctactttcatcaatctctttaccgaaggtgattgtgcaactaagtccttgttgcttatcaattgccacattaacgcttggcggtacttcattggtgcgaataaataactgacttccctggccgacaacgccaatattatgaccatggatatcattgacttcataaccaaacgttaaactttgcccatctgctcttaacgcttttataaaccatggcttgcgctgatcggtatcaaaattaaccagtacaaccgcgccgcgataaggggcggcaattttccggttgccacgtaattctgcttcgctatcgctttggctcacatccagcatcaggtgattttcccgataaggtgtcattccgtcgtatatcaccactccattacggtttgttgtgcgatatttttgcccattgacataagcatctttaattcctggcgcattcatcacagcaaacgtttcggaaagacggttcgccagattaacgccaccgctccaggcgacaatgcccccactaacactggctccagcctgtcgataagtactgctctgactataactgccattcactgtcgcaaccggcgcgttccaggtcaaattcgccccagctgtcgtttcatttccctgatgttgatgactcaggttgacaccataattgaactgatcccgactccctactgttccacttaatcccgtattattactggcaaacccctgatcatcaaacgtcgtactgttagacatatatatttgccgacgaggcgtgctaacgtcatcaccccaatcaaagggaatgcttataaaaatattaaaacgtttctcttcatgatgattctcgtcataagcctggcttgccgcgagggtatagcttatccgtcgcaggttgttggaataactcaactgataatccttactactgccgctacgcccccagtaatctcgccataacgtacttaaactcacagacccccaaccttctggcaaactctggctcatattggcggaaaagctatttttgcggccaaaatcgttctggtaataatcggcaatgtcatagacatcgttttcatcacggcgataattatctttattgtttgcccaaacgtgatcgttaaatgtccggtaatcacggctgctataacgccaggccgccagaccaaaacgcgtgctcgtttggctcacaaatttgttgtaggcaatttgataactttgcccgtcaaacacatcgccgttgtcttgtttactatggctcttagtggcatcgacggaaatggcaccaatgcgtgtattccagccagcccccaaagtaaacgcgtaataattattcgcgaccatgctgccaccatacagcgtcaataaattattaaaaccatactgataacccgcctggacaaaatcactttgtttgctcgccccttcaatatggctacgacccgccgctaaatcatatttgctcacgccgggttgcagcatatttggcaccgctgcataaggcaccagataggtggttacgctgccgtccgcctctttcacgctgacatcaagatctgctccaccaccggccaactgcaaatctgtaatcgcgaacgggccaggaggaacctctttctgataaaccacaaaaccattctgttcaatagttaccagcgcgttactctgagcaatcccctgcacccgtggcgtaaaattttgtttgctgttaggcaacatctgcatatcacgaaacaaccgcacacctctgaagcgaacagaatcaaaaatatcgctacttgtgtacatatcacccacgcgaagcgtgccgagaagttgggcaaatccacgttccagatacagggtattgcttttccacacccctggattgttatttgttttactgaaactggcatcagaatgcagttgccaccccagtaaatttaacccgctgttaaaacgtacatatgtactcttgttattaccgctcgctttatagtcgctgtaatactgactcagataataagaggtataaaacgcattaataccccgctcccagttttccggtggaacatagccactttccagttcttccacccaggcctgcgggacactgaaatcgagacgaaaaaccccgatatcccaggtatagctcccaccctgaacaagttgctcaaatgttaaacattgcttaccgctggcgaagttatcgctattaatgcctaaccgcttgataacttctctacttaaacatgtttcttgcgggttgtctttaacaataatctcatatttcccgcgccattgcttattgacataaatatcgatgtcatactgccccggtaagggttgattatcatcaagacgaatatttgcaacctgctggtctttcattccacctatcataaaatgggtatcaaaggtttcttcagctgcataagcttcaatgccgagcaataacgctacgattgcacttgcaagtggggtcattctcaacataggcagctcctgcaattaaattttgtcactaatatagttgccatggtcatcgataatggtcagatgccagttatttgcattattacttttgacattaacactctgactttctaagggggcaatcataatagtttcataattgactttgacattattagctttgacatcgctaatcgtcacccaattagcactgtcattttttatcaccaaaccattgccactgcgatttaccagcaattttttaaatgtcgctttatttaccggagcaatacccgctggccggtaaaacaacttaattctgttttgcatcgcaaacttcagtgcattcttaccttcttgctctggactatttggtggaatatccagaacattcagataaaaaatgctttctttattagtgggcagtttattcggcataattttgatttttacttgctgcccggaatttgcccctatttttgccactggtggcgttaacatgaaaggaacctgaattttttctggtggtaaactcgtatcgccatcatcaatccacgcctgcagcaggctagaacggtttccctggttcatcaactgcaccatcacttctttattttctgccgggtaaataatgcgcgtcccgtagataacaattccggcatgtgcaggaaggaccatagaaaaaatgagtaaagataataatcctttcattttaatgcctcttaaattaaaaggccgccatgggatagcggccatgtttattacctggagaaacttacaattttatttattaatcctgcgccacacgcataaccagagaagataacacatcaccactttgcacactgttatctgtcagtttcaggtattttgctttaaacggaatagcatattgaccttccgctgttttataactctcaatgttaaaaggtgcagaaacatccaggacatcgctgttatcacctaaatagagatagtaacccacggtatcgttgctactggctatcgccttatcgttaccggttattttatcgttggtaatcaagctgagttttacaccagcaacttctttcgggcagctaatttttaacatgctgctggttacaccgactgcatcatcataggtagaatatttagctttaccttcaaagacactggttggtacagtcggcatattaatacttacactatcaccacccgcttcgaatttacacggagattctgcaatattccccttaatagttaatgttccggtatcaacgtctgcagcaaatactccagcgctcataaaaaaagaagaaaagacagcggcagcaataatactacgtttcataatatgttccttaataaaatttatttttggttgttaagagtctgtatctcttggaaacaaatttctcacatcaaaaaagttgccgcaatgtaaacacattgttttattgatttaaaacaaattaaccattgcaatataaatacaaaaaatatttaagagtattaactatttatcgcatctatcaattaatgtagatttatgtaaatggtattgttgatatcaataaaaaagccgaaatcatttatataaatgatttcggctttctaaatgcaattaaaatcaggttgccaaattaatcgtagcgatttaacacgattcgacgtttgctatcgctacctgcaacaaccacttctgtcgttacacctttgacggggctagaaaacagatgacgggtgtcaacattatacgttaactgaccacaatgctgttgaggttgaccattaaccatagccatactgcatgttgggggactgatcctgccattaatcgctaatgtggcagtctcactagagaatgcgggagaagccaatccataggcaagaaaaataattccactcagccaatacttattcattgaacgttatccctgtagtaaaggttatgcctggatagaatgagtgcataacaaactatagctgtacatccactacacagccacgaaggatgataatgaagcattgcctgtatgatcaatcgactttgtagagtttcggacgaaggtccgcagaatattcgcagtattaaataagtgttcattaatgcggcaaaaactaatacaccgcatcaatgtaacatctctgcggtgtatgaagaataaccagaatggttaataggcgttagaccgcgcggaaggaaatctcgcctggaatgacttcaccctgccagtagagctgagctgcaacgcggtcagccagctggcggtagatagcggtaaattcgctctccggacggctgataaccgttggcgtacctttatcgagatcctcacgtaaggagatgtgtaacggcatctgccccagcagctgtgtatggtatttttcagccagtttctctgcaccaccggtaccgaaaatcggttcatggtgaccacagttactgcaaatatgcacactcatgttctcgacaataccgagcaccggaacctcgactttctcgaacatcacaatgccttttttcgcatcgatcagcgcgatgtcctgcggggtggtgaccacgactgcaccggttactggaatgttttgcgccagcgtcaattgaatgtcaccggtgcctggcggcatatcaagcaccagatagtcgagatccggccacaaggtttcctgcaacatctgcattaacgccttgctcgccatcggtccacgccacaccatcgcattgtcgtcagtgaccagataaccaatactattggttgccaggccatgagacataatcggtgccatatgggtaccgtccgggctagttggacgctgattttctgcgcccaacattgttgggatacttgggccgtagatatcggcgtccagaatgccgactttcgccccttctgccgccagcgccagtgccaggtttaccgccgtggagcttttacccacgccgcctttaccggaactcaccgcgataatgttcttcacaccgttaattcccggctgattcttcacgcgtttcagagtggctatgttatggctcagtttccagtcgatagctttcgccccggtgatgcgcagcagttcggcgctacattgctcttttaactcttcgaacgcgctatgccagacaaacggcataaccagttccacatgcaacgtgtcgtccatccaggcgacatggtgcaacgctttcagcgtggtgaggttatgcttcagggttgggtgctgaaaattggccagtgtcccggcgaccattgcgcgcaaggcttctggacttttggcctgggattgttcgttcatcccgactccttttttgtatagataaaccatcagctgatagtttacctgaagaatatagagaagtacttacttaacattttcccatttggtactatctaaccccttttcactattaagaagtaatgcctactatgactcaagtcgcgaagaaaattctggtgacgtgcgcactgccgtacgctaacggcagtatccacctcggccatatgctggagcacatccaggctgatgtctgggtccgttaccagcgaatgcgcggccacgaggtcaacttcatctgcgccgacgatgcccacggtacaccgatcatgctgaaagctcagcagcttggtatcaccccggagcagatgattggcgaaatgagtcaggagcatcagactgatttcgcaggctttaacatcagctatgacaactatcacagcacgcacagcgaagagaaccgccagttgagtgaacttatctactctcgcctgaaagaaaacggttttattaaaaaccgcaccatctctcagctgtacgatccggaaaaaggcatgttcctgccggaccgttttgtgaaaggcacctgcccgaaatgtaaatccccggatcaatacggcgataactgcgaagtctgcggcgcgacctacagcccgactgaactgatcgagccgaaaagcgtggtttctggcgctacgccggtaatgcgtgattctgaacacttcttctttgatctgccctctttcagcgaaatgttgcaggcatggacccgcagcggtgcgttgcaggagcaggtggcaaataaaatgcaggagtggtttgaatctggcctgcaacagtgggatatctcccgcgacgccccttacttcggttttgaaattccgaacgcgccgggcaaatatttctacgtctggctggacgcaccgattggctacatgggttctttcaagaatctgtgcgacaagcgcggcgacagcgtaagcttcgatgaatactggaagaaagactccaccgccgagctgtaccacttcatcggtaaagatattgtttacttccacagcctgttctggcctgccatgctggaaggcagcaacttccgcaagccgtccaacctgtttgttcatggctatgtgacggtgaacggcgcaaagatgtccaagtctcgcggcacctttattaaagccagcacctggctgaatcattttgacgcagacagcctgcgttactactacactgcgaaactctctagccgcattgatgatatcgatctcaacctggaagatttcgttcagcgtgtgaatgccgatatcgttaacaaagtggttaacctggcctcccgtaatgcgggctttatcaacaagcgttttgacggcgtgctggcaagcgaactggctgacccgcagttgtacaaaaccttcactgatgccgctgaagtgattggtgaagcgtgggaaagccgtgaatttggtaaagccgtgcgcgaaatcatggcgctggctgatctggctaaccgctatgtcgatgaacaggctccgtgggtggtggcgaaacaggaaggccgcgatgccgacctgcaggcaatttgcagtatgggcatcaacctgttccgcgtgctgatgacttacctgaagccggtactgccgaaactgaccgagcgtgcagaagcattcctcaatacggaactgacctgggatggtatccagcaaccgctgctgggccacaaagtgaatccgttcaaggcgctgtataaccgcatcgatatgaggcaggttgaagcactggtggaagcctctaaagaagaagtaaaagccgctgccgcgccggtaactggcccgctggcagatgatccgattcaggaaaccatcacctttgacgacttcgctaaagttgacctgcgcgtggcgctgattgaaaacgcagagtttgttgaaggttctgacaaactgctgcgcctgacgctggatctcggcggtgaaaaacgcaatgtcttctccggtattcgttctgcttacccggatccgcaggcactgattggtcgtcacaccattatggtggctaacctggcaccacgtaaaatgcgcttcggtatctctgaaggcatggtgatggctgccggtcctggcgggaaagatattttcctgctaagcccggatgccggtgctaaaccgggtcatcaggtgaaataatcccccttcaaggcgctgcatcgacagcgccttttctttataaattcctaaagttgttttcttgcgattttgtctctctctaacccgcataaatactggtagcatctgcattcaactggataaaattacagggatgcagaatgagacactttatctatcaggacgaaaaatcacataaattcagggcagttgagcaacagggaaacgagttgcatatcagttggggaaaagttggcaccaaagggcaaagccagataaaaagtttttcagatgctgcggcagcggcaaaagcggagcttaagctgattgcggagaaggtgaagaaggggtatgtggagcaagcgaaggataattctttgcaaccttcccaaacggtaacgggctctctcaaggtagcggacttatccaccattattcaggaacaaccctctttcgtagcagaaacccgtgcgcctgacaaaaatacagatgctgttttaccgtggctggcgaaagatattgctgtcgtttttccgcccgaagttgtacacaccacgttaagtcatcgccgctttcccggagttcctgttcagcaagcagacaaattgccccaattacgtcgcttagcctgtagtgtgtcgcaacgggataataaaacagccacatttgacttcagcgcctgttctttagaatggcaaaacaccgtcgcccaggcgatcagtcagatcgacggcctgaaaacaacacagttaccatcaccagtaatggctgtactcacggcacttgaaatgaaatgcacaagatataaagtgcgtgaggatgttatggatcagatcgtccaggaaggcggtctggaatatgctactgatgtaataatacaccttcaacagattgatattgaatgggattatgcgaataatgtcattattattctgccgtctggcattgcacctagctacttggagcaatattccagatttgaatgacgcctacgtaaacatttatcactgacggaagagtctctctggcaaaaatgtgcacaaaaacttattgccgcaattccacatattccagaatggcggcaaccattaattgctttgttattacccgaaaaaccagaaattgcacatgaaattgcccagcgtctactggggcaaaaaaaattaccctcgcttgagtggttaaaaatagtggcgactgatgagcacattcttgcctcattagaaaaatatcacgaaccatatgccatttttgatgattactattgtggtgcgatatggtcagccaccgtattacaggagcaaggtgttgcagccctgccccgatttgctccctatgccgcaagtgactactgcgccgatgtgttgcgtcatatcaatcatccgttcgcattgacactgcttatacgtgtagccgggcaaactaaacgctgtcacgatcggatgacgaaagccattgctgcgttcccacatgcagcaatggcggcactgacggaacttcttgggcaaaaagaagagaacagttggcgcattatgctaatgacaatgcttatctcacaaccagcactggcagaacaggtcattccctggctctcgacacccgcagttgccgtactgaaatcatgccagcaacaactgacacagccctcaaaccatgccagcgccgatctactgccagccgtagtagtctcccctccctggctttcgaaaaagaaaaaatcgccgattccggtgctggatttagcgccattaggcattgagccaatctgttatctgacagaagaaatcagtaatcaacttttggcgaaatatatctggtattcaaaacacatcacggttagccatgaagaaagtactaccaacctgttggcaaggatgggttttcaacgacggatcgctggtacatatattaaagctcccgaagcggtagttgaggcatggctaaatgaagattattcaaccttactaagtgaatttaaggtgtttcattcacctaccgggcattattggcagttggggattttgacaacattgccgctggagaaagcagtaaaagcatggaatgcccttaccctatctccacataccgataccgaatactccatgttacattttggactcaaagggttacctgggttagtaaactcacttgcacgctatccacaagaagccttgcccatcacgaattacttcgcagcgagtgagctggctcctgccgtcgcccgtgccttcaacaaactgaaaacgctacgcgaaaacgcccgtagctggctgttgaaatacccggaacatgcccttaccggcctgctgcctgcggcgctcggcaaagccggtgaagcacaggataacgcccgcgctgccttgcgtatgcttaccgaaaacggtcatcagccattactgcaagaaatcgcccgacgttataaccagccggaagtaaccgatgcggtgaacgctctgcttgcgctcgatcccttagataatcacccgacaaaaatccccactcttccggccttttatcagccatcgctctggacgcgcccggtattaaaagcaaatgcccaatcactgccagatagcgccctcctccacctcggtgaaatgctccgcttccctcaggaagaggctctgtatccgggattattgcaggtgaaagacgtctgttccgccgactcactggcgggatttgcctgggatctgtttaccgcctggcagaccgctggcgcgccgtcgaaagagagttgggcgttcactgcgttaggcgttctcggtaacgatgacaccgcccgcaaactgacgccattaatacgcgcctggcctggtgaatcccagcataaacgcgccaccgttgggttggatattctcgctgctatcggtagtgatatcgcccttatgcagcttaacggcatcgcccagaaactgaaattcaaagcattacaggagcgggcaaaagaaaaaattgccgacattgccgagagccgcgaactcacggtggcggagcttgaagatcgggttagcaccggatctcggtctggatgataacggttcgctgctgctggattttggcccacggcagttcaccgtcagctttgatgaaaccttaaaaccgtttgtgcgtgatgtttccggcagccgcctgaaagacctgcccaaaccgaacaaaagcgatgatgaaacgcgggcgaacgatgcggttaaccgctacaaattgctgaaaaaagatgcgcgtaccatcgccgcccagcaggtagcaaggctggaatccgccatgtgcctgcgccgccgctggtcgctggaaaacttccagctcttcctggttgagcatccgctggttcgtcacttaacccgccgtctgatttggggcgtttatagcgccgaaaaccagctactggcttgctttcgcgtagcagaagataacagctccagcaccgctgacgatgatcttttcaccctgccggaaggcgatatctctatcggcactcctcacgttctggaaatatcaccaacggatgctgccgcctttggtcagctttttgccgactacgaactgctaccaccgttccgccagctcgaccgtaacagctacgccctgacagaagccgagcgcaatgccagtgaactgacccgctgggcaggcagaaaatgcccgagtggtcgggtcatggggctggcgaataaaggctggataaagggcgaaccacaggatggaggctggatcggatggatgatcaaacctttgggtcgctggtcgttaatcatggaaatcgatgaaggctttgcggtaggcatgtcgccagccgaactcagcgctgagcagctcttaagcaagctgtggctatgggaaggcaaagcagaaagatatggctgggggagtaattcaacacaggaagcgcagttctccgtaatcgatgccatcaccgccagcgagctaattaacgatattgaagccctgtttgaataaggaaagagcatggacaaggaattaccgtggctggcggataacgcccaactggaactgaaatataaaaaaggcaaaacgccgctcagtcatcgtcgctggccgggcgaaccagtgtccgttatcactggaagtctcatccagacattgggtgatgaattgctacaaaaagctgagaagaaaaaaaacattgtctggcgttatgagaattttagtctggagtggcagtccgccatcacgcaggccatcaacttgatcggcgaacacaaacccagtatcccggcccggacaatggcggcgctagcctgtatcgcgcaaaatgacagccaacagttgctcgacgaaatcgtccaacaagaggggctggaatatgcgactgaggtggtgattgcacgccagtttattgcgcggtgttatgagagtgatcctctggtagtgacattgcagtatcaggacgaggattatggctatggttatcgcagtgaaacctataacgaattcgatctccgactgcgtaagcatctctctctggcagaggaaagctgctggcagcgttgcgccgacaaactcattgccgcactaccaggaataaacaaagttcgccgcccttttattgcgctgatcctcccggaaaaaccagaaatagccaatgagttggtaggccttgaatgcccgcgaactcattttcattctaaggagtggttaaaagttgttgctaatgaccccacagcggtgagaaaactcgaacactactggagccaggatatatttagcgatcgagaagccagctacatgagccatgaaaaccacttcggctacgcggcctgcgccgcccttttgcgcgaacaaggactggcagccattccgcgcctcgcgatgtatgcccataaagaagattgcggcagtctgctggtacaaattaaccatccgcaagtcatccgcaccttgctactggtggctgataaaaacaaacccagcctgcaacgtgtagctaaataccataaaaacttcccccatgcgacgctcgccgcactggcagaactgctggcgttaacagaaccaccagcccgccctggttatccaatcatcgaagacaaaaagctgcctgcacagcaaaaagcacgcgatgaatactggcgtacgctgttacaaacgctgatggcaagccagccacaactggcagcagaagtgatgccgtggttaagtactcaaccccagagtgtgctgaagagttatttaagcgcaccgcccaaaccggttattgatggcaccgataacagcaatctgccagaaatcctcgttagtccaccgtggcgtagtaagaaaaaaatgacagctccacgtcttgatttggcaccgctcgaattaactccgcaagtttactggcaaccaggcgaacaagagaggcttgccgccactgagcctgcccgttatttcagcacggaatctcttgcgcaacgcatggaacaaaaaagtggacgagttgtattacaggaactgggttttggggatgatgtatggctgtttctgaattatatactccccggaaaactggatgctgcacgcaatagtctctttgttcagtggcattactaccaggggcgggttgaagagatcctgaatggctggaactccccggaagcacaattagcagaacaggcgctccgcagcggtcacatagaagcgttaattaacatatgggaaaatgacaactacagtcattatcgtccggaaaagagtgtctggaacctgtatttattggcacagttgccgcgtgagatggctttgaccttctggctgcgtatcaatgagaaaaagcatctgttcgcgggtgaggactattttctcagtatcctcggattggatgcgctaccaggtctgctgttggcttttagtcatcgtccaaaagaaacatttccgttaattttaaattttggcgcaacagaactggcgctgcctgttgcccacgtctggcgacgtttcgcggcgcagcgtgatctggctcgccagtggattttacaatggccggaacatacggctagtgcacttatccctcttgtctttaccaaacccagcgataatagcgaagccgcattacttgccctgcgtttactgtacgaacagggacatggcgaattgctacaaaccgtggcaaaccgctggcagcgtacagatgtatggtctgccctggagcagttgcttaaacagggtccaatggacatttacccggcacgcattccaaaagcccctgatttctggcatccgcaaatgtggtccaggccgcgccttatcactaataatcaaactgttaccaatgacgctctggaaattatcggcgaaatgctgcgctttacccaggggggacgtttttatagcgggctggaacaactgaaaacgttctgccagccacaaacgctggcagcttttgcctgggatctcttcactgcgtggcaacaagctggtgcccccgcaaaagacaactgggcatttctggcgttaagtctctttggtgacgaaagcacggcacgggatctgacgacacagatcctcgcctggccacaagaaggcaaatctgcccgtgctgtcagcggcctgaacatccttaccctgatgaataatgatatggcgctgatacagctgcatcatataagccaacgggctaaatcccgccccttacgtgataacgcggcggaatttcttcaggtggtcgcagaaaatcgcgggctaagccaggaagagctagcggacagattagtcccaaccctgggccttgatgatccgcaggcgttgagttttgattttggtccccggcagtttaccgttcgcttcgatgaaaatctcaacccggttatctttgatcagcaaaacgttcgccagaaaagcgttccccgtttgcgcgccgatgacgatcaactgaaagcgcccgaggcactggcccgactaaaagggctaaaaaaagatgctactcaggtgagcaaaaacctgctcccgcgtcttgaaacggccctacgtaccacccgacgctggagcctggcagattttcattctctgtttgttaatcatccctttacccgtctggttacccagcgattaatatggggggtttatccggcaaatgaaccgcgttgtttactcaaagcctttcgtgtggccgcagagggggagttctgcaatgcgcaagatgagccaattgacctgcctgcggacgctctgattggcattgcccacccgttagaaatgacagcagaaatgcgcagtgaatttgcacagctttttgccgattacgaaattatgccgccttttcgccagttgagccgccgcacggtgctgctcacacctgacgagagtaccagtaacagcctgactcgctgggaaggtaaatccgctaccgttgggcaacttatgggaatgcgatacaaaggctgggagagtggctatgaggacgcatttgtctataacctgggtgagtaccggctggtccttaagtttagtcccggttttaaccactacaatgttgatagcaaagcgctaatgagcttccgttctcttcgagtgtaccgtgacaataaatccgtcacttttgccgaacttgatgtgtttgatttgagtgaggcgttaagcgcacctgacgtcattttccattaaaacacagcgggcagtgatgcaactgcccgttatcaacacgacttaccagcggggaaagcgatgatcgtgcaaaaagagctggttgctatttacgattatgaggtccctgtacctgaagatccgttttccttcagacttgagatccataaatgctctgaattatttacaggttccgtctatcgactggagcgattccggctacgtccaacatttcatcaacgtgatcgagaagatgctgacccgctaataaatgatgcgttgatttatataagagatgagtgtattgatgagcggaaattacgaggtgaaagtcctgaaactgtaatagcaatttttaatcgtgaactacagaatatattcaaccaagaaatagaataatatactctaaataattcaaattggtccgatccggcgcaacgtcccaatggcctggattataaatctcattatcttaattgcaacggggtccagccgtggttataattcgttcgttggaacacgatgttgcacaggctgtggtgttaggcctgaaaatagtaaataaaagaacctgcctcaccagcaggtttttttatttactgtgatctgctttccagatatttttcgctcaaacaactaatgcgccaaacatttattgcgcgtaaaatatcgtttatttcattaatacatttcagggatgaatatatgagtccgcagaataatcatctgcagcgtccgcctgctgctgtgttatacgccgatgaactggcaaaattaaaacaaaatgataacgcaccttgcccgcccggttggcagttaagtttgcctgcggcccgtgcttttatccttggcgacgaagcgcaaaatatcagccgtaaagtggtgattagcccctccgctgtcgaacgtatgttagtcactcttgctaccggccgcggtttgatgttggtgggggaaccgggtaccgcaaaatctcttctttctgaattactggcaaccgctattagcggcgatgccgggttaaccatccagggcggggcatctaccaccgaagatcaaatcaagtatggctggaactacgccctgcttatcaatcatggtccgagtacggaagcgctggtccctgccccgctttatcagggaatgcgcgacggcaaaatcgtccgtttcgaagagataacgcgtacaccgctggaagtgcaggactgtctgttaggtatgctttctgacagggtgatgacggggccggaactcactggtgaagccagtcagctctatgcgcgagaaggctttaatattattgccactgccaatacccgcgatcgcggcgtcaatgaaatgagtgctgcgctaaagcgtcgcttcgattttgaaacggtttttccgattatggatttcgcccaggagttggaactggtcgccagtgctagcgcgcgtttgctggcccatagcggtattccgcataaagtgcctgacgcggtactggaattactggtccgcaccttccgcgatctgcgtgccaacggcgaaaagaaaacgagtatggatacactgacagcgattatgtccaccgctgaagccgtgaacgtggcccatgctgtgggcgtccgcgcctggtttttagcgaatcgcgcgggggagcctgccgacctggtggaatgtattgccggaaccatcgtcaaagataacgaagaagatcgcgcgcgtctgcgccgttacttcgaacagcgtgtcgccacacataaagaagctcactggcaggcttattatcaagcccgccaccgcctgccgtgaggaaagatgcatgagcgagccgttaattgtcggcatccggcatcatagtccggcctgcgcccggctggtgaaaagcttaatcgaaagccagcggccacgatacgtgttgattgaaggcccggctgattttaatgaccgggtagacgaactgtttttagcccaccagcttccggtagctatttacagttattgccagtatcaggacggtgcagcccccgggcgtggtgcctggacgccatttgctgaatttagcccggagtggcaggcgctacaagccgcacgtcgcattcaggcacaaacttacttcatcgatttgccttgctgggcgcagagtgaagaagaggacgatagccctgatacgcaagatgaaagccaggccttactgctgcgtgccacccgcatggataacagcgataccctgtgggatcacttgttcgaagatgaaagccagcaaactgcattaccctctgcgctggcgcactattttgcccaactgcggggcgacgcctccggcgatgcgctcaatcgtcagcgcgaagcctttatggcccgctggattggatgggcgatgcagcaaaataatggcgacgtgttagttgtctgcggtggctggcacgctccggcactggcaaagatgtggcgcgaatgccctcagaaaattaacaagccagaattgcccagcctggcagatgccgttacaggttgttatctcacaccctacagtgaaaagcgccttgatgtgctggcaggataccttagtggaatgcctgccccggtatggcaaaactggtgctggcagtggggcttgcagaaggccggtgaacaactgctaaaaactatccttacccgtttgcgccagcacaaattgcccgcttctaccgcggatatggctgccgctcatctgcatgcgatggcgctggcacagttgcgcggtcatacactaccgttacgcactgactggctggatgccatagcaggcagcctgattaaagaagccctgaacgcgccgttgccgtggagctatcgcggcgttattcatcccgataccgatccgattctgctaacgttgatagacacattagcgggtgacggattcggtaaacttgccccttctacgccacaaccgcctctgccaaaagatgtcacctgcgaactggaacgtaccgcaatctcccttccggcggagcttaccttaaatcgctttacccccgatgggctggcgcaaagtcaggtgttacatcggctggcaatactggagatccctgggattgtacgccagcagggaagtacactgacacttgcaggcaacggtgaagaacgctggaaattaacccgcccgcttagccagcatgcggcattgattgaggccgcctgttttggtgccacactccaggaagccgcacgcaataaattagaagccgatatgctggacgcgggcggaatcggcagtatcaccacatgtcttagccaggcggcgttagcgggtctggcgtccttcagtcaacaattactggagcaactcacactattaatcgcccaggaaaatcaatttgccgaaatgggccaggcgctggaagtgctttatgccttatggcggctggatgaaattagcggtatgcaaggcgcgcagatattacaaacgacgttatgcgcgactatcgatcgcacgctgtggctgtgtgaatctaacggcagaccggatgaaaaggagtttcacgctcacctgcatagctggcaagcgctttgccatattctgcgcgatctacatagcggcgttaatttacccggcgtttctctttctgcggcggtagccttactggagcgacgcagtcaggcaattcatgccccggcgctggatcgcggcgcggctcttggcgcactaatgcgtctggaacatcccaacgccagtgccgaagcggcgctgacgatgctggcgcagttatccccggcacaatctggtgaggcgctgcacggtttgctggcgctggcccgccatcaactggcctgtcagccggcatttatcgccggtttcagcagtcatttaaatcaactgagtgaagccgattttattaacgccctgcccgatttacgcgcggcgatggcctggctaccaccacgagaacgcgggacgctggcgcatcaggtgcttgagcattatcaactggcgcaacttcccgttagcgcgctgcaaatgccgttgcattgtccaccacaggccattgcacatcatcaacaactcgaacagcaggcactggcaagcctgcaaaactggggagttttccatgtctgaactgaacgatcttctgaccacccgtgagctacaacgctggcgattaattcttggcgaagcggcagaaacgacgctttgtgggctggatgacaacgcccggcagatagaccacgcgctggagtggctgtatgggcgcgatcctgaacggctccagcgtggtgaacgttccggtggattaggtggcagtaatctcaccacccctgagtggatcaacagtattcacacgctgtttccgcagcaggtgattgagcggctggaaagcgatgccgtgctgcgctacggcattgaagatgtggtgacgaatctcgacgtgctggaacgtatgcagccttctgaaagcctgctacgcgctgttttgcacaccaaacatctgatgaaccccgaagtactggctgccgcccgccggatagtgtgccaggttgttgaagaaattatggctcgactggcaaaggaagttcgtcaggctttttctggtgtccgcgatcgccgtcgccgtagttttattccactggcgcgaaactttgatttcaaaagtactctgcgcgccaacctgcaacactggcacccgcaacacggcaagttgtatatcgaatccccccgctttaacagccgcattaaacgccaaagcgaacaatggcaactggtcttactggttgatcaaagcggaagcatggtcgatagcgtgatccactctgcggtgatggcggcctgtttgtggcagttacccggcattcgtacccatctggtggcgtttgacacaagcgtcgttgatctcacggcagacgttgccgatccggtagagttattaatgaaagtacagttgggcggcgggaccaatatcgccagtgccgtggagtatggtcggcaacttattgaacaaccagcgaaaagcgtcattatcctcgtgagcgatttttacgaagggggtagtagtagtttactgacgcatcaggtgaaaaagtgtgtccagagcggcatcaaagtgctgggactggcagcgctcgatagcaccgcaacaccttgctatgaccgcgatacggcccaggcgctggttaatgtcggcgcacaaatagccgccatgacgccgggcgagctggcaagttggcttgcggagaatcttcagagttgacataacttgcggagaatcttcagtcatgaatagtctacgtccggaattattagaactgacaccgcaggccctgacggcgttaagcaatgccggttttgttaagcgcagtcttaaggaactggaaaatggcaacgtcccggagatcagccatgagaacgacgctttaatcgccaccttcagtgacggtgtccgtacccagctggcgaacggccaggcactgaaagaggctcagtgcagttgcggggccaacggtatgtgccgtcatcgcgtgatgctggtgttaagttatcaacgactttgtgccaccactcagtctacggaaaaagaagaagagtgggatccggcaatctggctggaagaactggctacccttcccgatgctacccgcaaacgcgcacaggcgctggtcgctaaaggcatcaccattgagttgttctgtgcgccgggtgaaattccctctgcccgcttaccgatgagcgatgtgcgtttttattcccgcagcagtattcgtttcgcccgttgtgattgtattgaaggcacactttgcgaacatgtcgtactggcggtacaggccttcgtcgaggccaaagcgcagcaagcagaatttaaccatttaatctggcagatgcgcagcgaacacgtcacaagttctgacgatccgtttgccagcgaagaaggcaacgcgtgtcgtcaatatgttcagcaattaagccagacattatggcttggcggcatcagccagccgctcatccattacgaggcagcattcaaccgcgcattgcaggcggcagagacctgcaactggcgctgggtgagtgaaagcctacggcaactgcgcgccagcgttgatgccttccacgcccgcgccagccactataatgccggagaatgcttacatcagcttgcggcattaaacagtcgattaaattgcgcacaagagatggcccggcgcgacagtattggtgaagttcctcctgtgccgtggcgcacggtcgttggctctggcattgccggagaagcaaagcttgatcatctgcggctggtgtctttaggtatgcgttgctggcaggatattgagcattatggtttacgcatctggtttaccgatcccgacaccggcagtattttgcaccttagccgcagttggccgcgaagtgaacaggaaaacagtccggcagctacgcgtcggctgtttagttttcaggctggcgcactggcgggcgggcaaattgttagtcaagcagcaaaacgcagtgccgatggcgagctgctgttagctacccgcaaccgcttaagcagcgttgtgccgctgagccctgatgcctggcaaatgttgagcgcgccgttacgccagccgggcattgtggctttgcgggaatatttacgccagcgtccccccgcctgcatacggcctcttaatcaggtcgataacttatttattctgccggtcgctgagtgtattagcctcggttgggacagcagccgccagacgctggatgcgcaggtcattagcggcgaaggggaagataatgtgctgacgttaagtttaccagccagtgccagcgcaccttatgccgttgaacgcatggcggcgcttttgcaacaaacagacgaccccgtgtgtctggtttctggctttgtcagttttgttgaagggcaattgacactggaaccacgggtgatgatgacaaaaacccgtgcctgggcgctggacgcagaaactacgcctgtggcaccgctaccttctgccagcgttttgcctgtgccgtctactgctcatcagttgctgatacgctgccaggcgttacttattcaactgctccataacggctggcgctatcaggaacagagtgctattggtcaggcataattgctggcgaatgacctcaccgcggtgggtttttatcggctggcacatgtgttgggacaatttcgtaatacagaaagcgaggcacgggtagaagcaatgaataacggtgttttgctttgcgaacaattattccccatgcttcagcaacaaggatgaaatagtgctttttactaagagttctactccagttccggactgctcacgccacggtattaggcatatcctatatagcccctggtgagagtcaccagttccttgattaaataaaatggagttttacatgaaggctttcaataagctgttttccctcgttgttgcatctgttctggttttctctcttgctggctgcggtgacaaagaagaaagcaagaaattcagcgccaatctgaacggcactgaaattgccattacctatgtctacaaaggtgacaaggtgcttaagcaatcttctgaaaccaaaattcaatttgcctccattggtgcaaccaccaaagaagatgctgccaagacacttgagccgttaagcgccaaatacaaaaacatcgcgggtgttgaagaaaaattaacctataccgatacctacgcgcaggaaaacgtgactatcgatatggaaaaagtggattttaaagccctgcagggtattagtggaatcaacgtttctgctgaagatgccaaaaaaggtatcactatggcgcaaatggaactggtgatgaaagccgctggttttaaagaagtgaaataatcggttggcggtcatgctctaaacatgaccgccaattttttagccttttttcacatgctggcgcgctgccagtccacgcagaaaataacgtaaaaattgatcgccgcattcgcggaagtttttatgatccggtgcgcgcatcatcgctgtaatttccggcatgctaacgcggaactgctgttcggtgaggatagccagaatgtcatcggttttcaggctaaacgcgatgcgtaattttttcagcacgatgttgttattaatgcgacgttccggctccagtgccggagcagactcatccttgccgcgtttttcataaatcaggccattgaggaaactgctcaaaacaatgtccggacaacgctgaaaaccctcttcgtcttctttacgtagccagacggcgatctgttccgcggtggcttcgacattacccagcgccagaatacgcaccaggtcattattattggctttcaaaatgtagcgcacgctgcgcagaatatcgttacttagcatgaggccttcaggtgttgatgaggcaaaaagccattttagcagtcttttacaggccaatcgcctcttttaagcttttcagataacggcggctgaccggcacggttaagccattacgcaaaatcaactcggcctggccgttatcttccagacgaatctcctgtaaatgcgcgaggttaaccagatactgacgatggcagcgcagtagtggtgtacgactttccagggtacgtaatgtcaattcggtaaagccctctttcccttcgtggctggtaacgtagacaccgctcatccgactgctgacaaatgccacatctttcatttgcagcaaataaatccgactatgccccgtacaagggataaatttcagcgcctgttgattttccggtaacaggctaacatcctgcttgctgcgctcctgacgcaatcgcgccagcgttttctccagtcgcgcttcatcaattggcttcagcagataatcaaaggcatgttcttcaaaggctttaattgcgtattcgtcaaacgcagtgagaaaaacaatatacgggcgatgttccgggtcaagcatccccaccatttccagaccactgatgcgcggcatctggatatcgagaaacagcacatccgggcgcagtttatgcaccgcgccgatcccttccacggcgttactacactctccaacgatttcaatatcgctctgctcctgcaaaaatacacgcaggttctcccgtgctaacggttcatcatcgacaattaagactttaatcatgcctcgtccctccatggtagtcgtaacgttattcgggtgtaactatcaggctcacaggcgacgcttattccatagtcatcgccaaaccgttcacgtaaacgcttatccaccagattcatccccagcccactggcattggttaccggttgatacaaaccggcattgtcttcgatctccagcatcaaatgttgcccctcacgtcgggcgctgattgccactcgccctgtatccagcagttgacttgtcccatgtttaatggcgttttccactatcggttgcagggtaaacgcgggcaattgctgctgggataattcttgcggaatagcaatgttgacctgcaaccggctctggaagcgcgccttttcaatttgcagataagcattcacatgttcaatttcgtcggcgagagtaacaaactcgctaggccgctttaagtttttgcggaaaaaagtggaaagatactgcaccagctggctggcctgttcgctgtcgcggcggatcaccgctttaatggtgttaagcgcattaaacaaaaaatggggattcacctgggcgtgaagcagtttgatctcactctgggtgagcatcgctttttgccgctcatattgcccggcaaggatctgcgcgctaagcaattgcgcaatcccctcacccaacgtgcggttgatactactgaataaacggtttttggcttcatacaatttgatggtgcccatcacccgctgattttcaccacgcaacggaattaccagcgtgctccccagtttgcattgcggatgcaaagagcaacggtaaggtacttcgttgccatcagcgtagaccacttcaccggtttcaatcgcttttaaagtataagtactagaaatcggtttgccgggtaaatggtggtcgtcaccaattccggtaaaggccagcaatttctctcgatcggtaatcgcgactgcaccaatatccagttcctgatacagcacctgagccactttcatgctgttcacttcgttaaacccctggcgcaaaatgccttccgtgctggctgccactttcagcgcagtggcagaaaaagcgctagtgtatttttcaaacatcgcgcgtttatcgagcaatatacgcataaacagcgccgcgccgacggtattggtgaccatcattggcgcagcaatattactcaccagacgcaccgcatcttcataaggtcgggcgatcgcaaggatgatcagcatttgcaccatttcagcgacgaacgtgacggcaccggcggtaatggggttaaagactttatcagtgcgcccgcggcggatcaggatgctgtgtaccaggccaccgagtaatccttcaacgatggtgctgatcatgcaacttaacgcggtcatgccccccatgctatatcgatgtaagccgccggtcagcccaaccagcccaccgacgaccggaccgccgagtaagccgcccattaccgcgcctatcgcacgggtattggcaatagaatcgtcaatgtgcaacccaaaccaggtgcccatgatgcagaagatggaaaagacgatgtagcagagaaatttatgcggcagacgaaccgtgacctgcattaacggtatgaataatggcgttttactcattaaccatgcaatgactaaaaaaacgcacatctgctgaagcagcagcaacaccagattaaaatcgtacatacccgcaaaccacacttccctttaaaacgcgtaacatacattgcctgcgtttaactttctttgaactcttgcagaaaaatgagaattcgtgagtacgatcactcaaaatcgcctggcaaaaataaaatcaccctatagatgcacaaaaaacgggcaaaactacctggttcgcaaaactgcgtctaaagttaaaccgggacctcgcgagcaagggtgagacgatggcgctttacacaattggtgaagtggcgttgctttgtgatattaatcctgtcacgttacgcgcgtggcagaggcgttacggattgctgaaaccgcaacggacagacggcggtcatcggctgttcaacgatgccgatattgaccggatccgcgagatcaaacgctggatcgacaacggcgtgcaggtcagcaaagttaaaatgctgctcagtaatgaaaatgttgatgtgcagaacggctggcgcgatcagcaagaaacattactgacttacctgcaaagcggcaatctacatagcctgcgaacgtggatcaaagagcgcggtcaggattaccccgcccagacactcaccacacatctgtttattcctctgcgccgacggcttcagtgccaacaaccgactctccaggcgctgctggcgatcctcgacggcgtactgatcaactacatcgccatttgtctggctagcgcacgtaaaaaacagggtaaagatgcgctggtggttggctggaatattcaggataccacccgtctgtggctggagggctggattgccagtcaacaaggatggcgcattgatgtcctcgcccacagcctcaatcaactacgccctgaactattcgaaggccgtacattgctggtgtggtgcggtgaaaatcgaacctccgcccaacagcagcaactcaccagttggcaagaacaaggccatgatattttcccactcggcatttaatgattcgttaacaaatgcgctttactgtacaatcctttcgttaacataaggagtgcattatgcgcatagctaaaattggggtcatcgccctgttcctgtttatggcgttaggcggaattggtggcgtcatgctcgcaggttatacctttattttgcgtgctggctaagcgcctgcaccagcctttcaaacaggcggtctgcgatgatcgccgccagtgccaccagtaacgccccctggatcacatacgcggtattaaatccgctaagcccgatgatgatgggcgtacccagcgtgctggcccctaccgtactggcgatcgtcgccgtaccaatgttgataatcacgctagttcgcacgcccgccagaatcaccggagccgccagcggtagctcgaccttacgcactcgctgaccacgactcattcccatacctttcgcaacttctgtcacgctggcatcaatcgctcccagcccggcaagtgtcgcctgcaggacgggcagcacaccgtaaaggatcaaggcgataatcgctggttgcagaccaaagccgatcaccggaacggcgatcgccagcactgcgacgggcggaaaagtctgtccaacggcggcaatagtttccaccagtgggcgaaattccgcgccccacgggcgagtgacagcaattccggcaccagtgccaatgatcaccgcaaacaaactgctaattcccaccagccagaaatgagccagtgccagagctgcaaaactttcttgctgataaacgggtcgtggcagttgtgggaacaaggcagcaaacagcggctggctgtaaggcagccagaaaatcagcgccacaaacagagcaatgagccagaacagcggatcgcgcaacatcttcatacgcttacgcctccaccagcagatcctgaaaatgcagcgtgccgcaaggctggccctgcatgttcaccaccggcagcacctcgcatccccgcgcaacaaacagagagagcgcatcgcgtagcgtcatctcttctgccagtgcctcaccatctgctcgttcttcgcgacgcacgtaatccgccacactacgtaagctaagcaggcgcacacccagttcactacgtccaaaaaactggcggacaaaatcattcgccggacgagtcagcatcgtcagcggattgccctgctgcactacttcaccgtgatccatcaataccagatgttctgccagccgtagcgcctcatcaatatcatgagtgaccagcacaatggtacgccccagcaaacggtgaatgcgcgtcatctcttgttgcaacgcgccgcgcgttaccgggtccagtgcgccaaaaggttcatccattagtaagacttgcggatcggcagccagtgcacgcgccactcccacacgttgctgctgaccaccggaaagctgatgcggataacgctcacgcaaattactctccagccccagtagcgccattaattcgtcgatacgatcgtcaatccgcgcccggctccatttttgtaattgcggcacggtagcgatgttttgcgccacgctccagtgggggaacaggccaatagattgaatggcatagcccatccggcggcgcaactccagtactggcaggctgcgaatttcttctccggcaaagcggatctctccgctgtcatgctccaccaggcggttaatcattttcagggtggtggatttgccggagccagatgtgccaatcagcacgctaaaactcccttcctgaaaattgagattgagatcgttaacggctttttgtgcgccgaacagtttgctgacatggctaaattcaatcattacgtttcaccttcagcagtgcgataagcaaatcgaacagcgcgtcggtaagcaccgccagaacaattaccgggatcacccccagcaacactaaatcaatggcgctgcttagcagcccctggaaaaccagcgcaccaaaaccgcctgcgccgattaacgccgcaatcaccgccatacctacagtttgcaccatcaccacccgcaggctgcgcagaaataccggtaacgccagcggtaactgaacatgcaggaaacgctgcgccccgctcatccccatcgctctggcgctttccagcacatcgcgcgggatctggttcaaaccgactaccacgccgcgcaccagcggcagcaaggcatagagcaccagcgcaatcagtgcgggtgtcattccggttcctgctatgccgagcgtccccagccacggaaaggccgtaaccagcgcggcaagcggcgcaatcaacaggccaaagagcgccacgctaggcacggtctgaatcacattgagcagagaaaaaattgccccctgccgagcagtggaaaagtagcaccagatgcccaacggcacaccaatcactaacgcaggcagcaccgcaccaaacagcaacgtcagatgttgtgccagcgcgtcgtcaaacacatcctgacggttggcgtattctttcattagactgagatcgttaagcgtgccggagtacagcaaccacagcggaataatggcaatctgcatatgcaacaaccagcgccacagcggatgcgtggagattcggcggatggcatcgctacaggccagcaatgccagcgccgcagccagccagaaaccactgccgaggctggtacgcgccagcgcactgccattttgcgccagttgggtcgccgcctttccagctccccacaccagcaatacgaagacgaattgcgccagaatgagtgcacaaatgctgccttttttaccgggaataaaacaggccgtcagccaggcgcaaccaacgcccaccagcatccagatcgtttgcggccacagctgccagagatgacgcccctcaccgctaactaaacgattaggcgcgtaactgataaacggcagcgccgctgcgattgccgtcagcaacagcagcagcgccagaacaggattaatacggaaataagtcacgggaaattacttcgtccaccctttttgtttcaggtagtcggcagccacttttttggcatccagtccttccacagcaatgctggcattcagttgctgcaatgtttttgcatcgaggctggcgaagactggctgtagccactgtgccatttgcggatactccctcaacacgctctcacgcaccactggtgcaggcgcgtagataggttgcacaccttgcggatcgcttaaggtttgcagccccagcgccgctaccgggccgtcagtgccgtaagccattgcagcattaacgccagaggtttgctgggcagcggctttgatcgtcaccgccgtgtcgccaccagccagactcagcaactgatcctgaccgagcttaaagccataggctttttcaaacgcgggtaacgcatcggcgcgttcgataaactctgcgctggctgccagtttgaaggtgccgccctcttgcagataacgactcaggtcggcaaggctagtgagtttatttttctctgccacatcctgacgcacggcgatagtccaggtgttatttgcaggcgcgggcgtcagccagattaacttgttgtgctcgctatcgagctttttgactttctcgtaaccttgctgcgcgtttttccacgctgcatcgttttcatctttaaagaagaaagcgccattgccggtatattccggatagatatccagttcaccggaagtaatcgccccgcgcaccacaggagtcgttccgagttgcactttattcaccgtcggtacgccgtggctttccagcacctgcaaaatgatattgccgagtagcgcaccttcggtatcgattttactaccgactttaacgggggaagccgcctgtagcggcaggctcacggctgccaacataaccagactacctgcccagagctttaagagtggcatgatgctttcctcattcttttactgttgttttcagcgaattaagagaaaagcatagttgataatggcggggttagcttgagcggaaggattcagttgcagaatcagataaatacttaagaggcatattcggtccggcgtttcctgccggatgcggcgcgagcgccttatccggcctacaaagggcgcaaacgtcgcgcccttactaaagcattacagcaactcaaactcgcctttcttaacgcgtgcggaatcagtgccgataaagacattgaacttgccaggctcggcgtcatatttcatctgttgattccagaacttcagcgcctcaatatcgatcgggaagctgacagtctgagtttcgcccggtttcagggtgattttctcaaagcctttcagctgtttcacagggcgactcatggaagccgtcacatcctgcaagtacatctgcactaccgtggcaccctcgcgcttaccggtgttcgtcacctgcacgctggcagtcactttgccgtcacgcttcatggtcggcgcagaaagtttcacatcagagacggtgaaagtggtgtagctcagcccatagccgaacggatacaacgccccgttagcttcatcaaaataacggctagtgtatttgttcggcttgtcggcattatacgggcgaccggtattcagatggctgtagtacaccgggatctgcccgacagaacgcgggaaggacattggcagcttgccggacgggttgtaatcgccaaacaatacatcggcaattgcattaccgccttcagtccccgcaaaccaggtttccagaatcgcatcagcctgctgatcttctttcaccagcgccagcggacgcccgttcatcagcaccagcaccagcggtttaccggtggctttcagcgccgcaatcaagtcacgttggctttgcggaatagtgatatcggtccggctggaggcttcgtgcgccatcccctgtgcttcaccgactacagccaccaccacatcagattgtttcgccgtctgcaccgcttcatcaatcatctcttgcgggctacgcggatcgactttgaccgcttcttcatactgattcaggaaatcgataatgcctttgtcactggtaacgttcgcccctttggcatacagcactttaccgttttcaccgacggcatttttaatcccggtcagtacggtcacggattgatcggcaacaccggctgcggaccagctgcccatcacgtcacgtttactgtccgccagtggcccaaccaccgcaatggtggcgctttttttcagcggtaacgtttcgagacggtttttcagcaacaccaagctttcgcgcgccacttcacgcgcttctttacggtgcaggcggctttcggcattggtatccaccgggtcagactctttcggccccaaatggctgtatgggtcgttaaacaaccccatatcatatttaacgttcagtacatggcgggcagcatcgtccagctctgccatcgtcactttgccggatttaatcaacccaggcagatacttgctgtagtactcgtcgctcatgctcatgttgattccggatttcagcgccacgcgcaccgcatcttccgggtctgccgccgtgccatgtttaatcagctctttgattgcaccgtgatcggaaacggtgatgcctttaaagccccactggtcgcgcagaacatctttcagcagccaggaatcggaggtggctggcgtgccgttcaggctgttcagcgccaccatcaccgcgccgctgcctgcgtccagccccgctttgtacggcggcatataatcattaaacaggcgctgcggactcatatcgacggtgttgtactctttaccgccttctaccgcgccgtatgcggcaaagtgtttgacgctggtcatcacgctgtagcgatctgccgggcttttaccctgcatcgcttccaccatggttttacccattgtactggtgagatacgtatcttcgccaaaaccttcggaagcacgtccccagcgcggatcgcggctgacatcgaccatcggtgcccaggtcatattcaggccatcatctgccgcttcataagcagagacacgtccgaccgttttcactgcatcgaggttaaaagagctggccagaccgaggctaatcgggaacaccgtgcgctgaccgtgcagcacgtcgtaagcaaagaaaagaggaattttcaggcggcttaattccatcacctgatcctgcatggcgcggatatcctgacgggttacggtgttgaaaatcgccccaacctgaccgtctttgatcatctcgcggatcgcctctttcgggttatccgggccgacgctgattaagcgcagctgaccaattttctcatcaactgtcattttcttaagcagttcggtgacgaacgcatcccgcgcttcgggcgttaatggatggttgccgaataaatcatccgccagtgctggctgcagggccagactcaccgcgattcctacactacatagccatttcatatggatttttcttcctttgttgcccgacgtggcagcgaaaatggtgcaaaaaccgtagtttgccataagcatgatggagagagaaaaagaatgctcagtttattgtctgaattttcaaaatattcactcgctgaattgttatacaaggcgctattctagtttgtgatattttttcgccaccacaaggagtggaaaatgtcttccatgacaacaactgataataaagcctttttgaatgaacttgctcgtctggtgggttctagtcacctgctcaccgatcccgcaaaaacggcccgctatcgcaagggcttccgttctggtcagggcgacgcgctggctgtcgttttccctggcagtctactagaattgtggcgggtgctgaaagcctgcgtcaccgccgacaaaattattctgatgcaggccgccaatacaggcctgaccgaaggaagcacgccaaacggtaacgattatgatcgcgatgtcgttatcatcagcaccctgcgtctcgacaagctgcacgttcttggcaagggcgaacaggtgctggcctatccgggcaccacgctctatagcctggaaaaagccctcaaaccgctgggacgcgaaccgcacagtgtgattggaagtagctgtataggcgcaagcgtcatcggcggtatttgtaacaactccggcggcagcctggtgcaacgtggcccggcgtataccgaaatgagcttattcgcgcgtataaatgaagacggcaaactgacgctggtgaaccatctggggattgatctgggcgaaacgccggagcagatccttagcaagctggatgatgatcgcatcaaagatgacgatgtgcgtcacgatggtcgtcacgcccacgattatgactatgtccaccgcgttcgtgatattgaagccgacacgcccgcacgttataacgccgatcctgatcggttatttgaatcttctggttgcgccgggaagctggcggtctttgcagtacgtcttgataccttcgaagcggaaaaaaatcagcaggtgttttatatcggcaccaaccagccggaagtgctgaccgaaatccgccgtcatattctggctaacttcgaaaatctgccggttgccggggaatatatgcaccgggatatctacgatattgcggaaaaatacggcaaagacaccttcctgatgattgataagttaggcaccgacaagatgccgttcttctttaatctcaagggacgcaccgatgcgatgctggagaaagtgaaattcttccgtccgcattttactgaccgtgcgatgcaaaaattcggtcacctgttccccagccatttaccgccgcgcatgaaaaactggcgcgataaatacgagcatcatctgctgttaaaaatggcgggcgatggcgtgggcgaagccaaaagctggctggtggattatttcaaacaggccgaaggcgatttctttgtctgtacgccggaggaaggcagcaaagcgtttttacaccgtttcgccgctgcgggcgcagcaattcgttatcaggcggtgcattccgatgaagtcgaagacattctggcgttggatatcgctctgcggcgtaacgacaccgagtggtatgagcatttaccgccggagatcgacagccagctggtgcacaagctctattacggccattttatgtgctatgtcttccatcaggattacatagtgaaaaaaggcgtggatgtgcatgcgttaaaagaacagatgctggaactgctacagcagcgcggcgcgcagtaccctgccgagcataacgtcggtcatttgtataaagcaccggagacgttgcagaagttctatcgcgagaacgatccgaccaacagcatgaatccggggatcggtaaaaccagtaaacggaaaaactggcaggaagtggagtaaaaattacggatggcagagtatcgccatccgaattcacttaatcgttctgtgccgtctgccccgccgccgccatttgggcggctttttgttttttatagctcaacgctgctgccggcacaggcatcactttaccggtttcaatccaggtacgcaggcggctggcatcggcaaaatgggtatatttgccaaacgcgtccatcactaccagcgccaccggtttattattgataaccgtacgcatcaccagacaatggcccgccgcattggtaaagccggttttggttaactgaatattccagttatcgcgatacaccagatgattagtattgcggaacggcagcgtatacgtcggattagagaaggttgccatatcttcccgggtagtacttaactgcccgatcaacggatattgtttgctggcaatgagcagtttggttaagtcacgggcagtactaacgttatgcacgctcaatccggtaggttcaacaaagcgcgtgttgttcattccgaggcttttcgctttcgcattcattgccttaataaaggctttgtaaccaccgggataatggtgcgcaaggcttgccgccgcgcggttttcactagacatcagcgccagcaacagcatatctttacggctgatttcgctattcagtcgtacgcggctatagacccctttcatctccggcgtctggctgatatccacttttagtttttcatccagcggcagtcgtgcatccagcacaaccatcgcggtcattaatttgctgatagacgcaatcggacgcaccagatccgggtggttgctatagatcactttgttggtattcagatcaacaatcatcgcgctaccggaggcaatttccggttgactagcggtggtagcggctgccgttttcgcaacggcctgcggtgcaaaaggcacagccagcatcagggccaggctaaataaagaaactcgaaatttcggcatgatgagcattcagatagtggttcacgcgcacgggttgcgcaccgccggagtaaggatttactgaggctagcgacgccatcataacgagcaaaaagtgcgatcgtcaaaggagaatcgtgaggaaatgctgcattgctgacatttacgccagcaatgcaacgtcaaagaactttttagaacaaacgataaccgtagccccatagtataacggttagggcgagcagcacttccagtaccagcacgccaatcgccagcgtgctactagagaagctaaggccttcctctttgttgatattcaggaagctcggaataccaaggtaaagcaggtagccggtgtaaaacagcgccaccgtgccgaccagcgcacacaaccagaccagtggataaagcgccaccagaccgcttaaaaacagcggagttgcaacgtagcccgcgaagaccatgcagtgcgcaagactcggacgctgcggataattacgcgccatccaccagatgacccgccccatcaccgcgaccccagccagcataacgccgtaaaacaagacagccagcgccagtccggtaaaccaggataacttcaggatagtgccatcgccaaaattccagccaatctgtgtagtgccaatgaaggcgcaaatcaccggaatcgccgccatcagcaaaacgtggtgggtgtaatggtgagaaatcgtttcgttttcgcgattaatcacctgcatttcacgatcgggatgggaaaacagtccccagacatggctcataccgcccccttgttgtgagttcatgaacctgacagttcaagtataagtcagcttgtgattattttttgttcgcccatgtaattttcactgtctgatgaacgtcctttttcagcgtgaatgattcacagggtgtatgcttactggcaaccaaagggagacagactggcctatggatctcaatacacttatcagtcaatatggttatgccgcgctggtgatcggtagcctggcggaaggtgaaaccgtgactttgctgggaggcgttgcggcgcatcaggggctattaaagttcccgctggtggtactttctgtggcgcttggcggcatgattggcgaccaggtgctctatctgtgcgggcggcggtttggcggcaagctgttacgccgtttcagcaaacatcaggataaaattgagcgggcgcagaaacttatccaacgccatccgtatctgtttgtcattggtacgcgctttatgtatggctttcgggtgattggcccgacgctgattggtgccagccagctgccgccgaaaatctttctgccgctgaatattctcggcgcatttgcctgggcgttgatttttaccactattggttacgctggtggtcaggtgattgcgccgtggttgcacaatctcgaccagcatttgaagcactgggtctggttgattctggtcgtggttctggtggtgggcgtgcgctggtggctgaaacgacgcgggaagaaaaagccggatcatcaggcgtaaaaccattgccctggataaggcgttcgcgccgcatccgacatccggagtaccatgcctgatacgacgcttgtgcgtcttttcatgccgaccaaaatattacccaatgaaatatccacgcacctcactgcgttattctgggttgaactgtggattcgccaacataaagccgccatccactatcaagctctgcccggtggtgtaatttgcgccctcgctacaaagccacaccaccaggctggcaatctcatgcgttgcgccaaaacgccgcaagggaatgctaggctccgcgtcgggcttcacgtcgctgtcatccatgccattcattggcgtggcgatcgccccaggcgcgactgcgttcaccaaaatcttatgcctgaccagctccagcgccatcgctttggttaacccaccgagcgcatgtttagcggctgtgtaggcgctggcatccggcagcggcgtatgttcatgtacgctcgtaatgttgatgatgcgaccgccctgcccttgtttcaccatctgacgagccgcaatttggctgcataagaatgcaccatcgacatcaacggtaaaaatcttgcgccactcatcaaaagccatatcaagaaacggcgctttggtcattgcacccgcattattcaccagcacatcaatgcgccccagccgttgaatgagtttctccagcgccagtgccccttctggtagattgccgagatccagctgcacgatctccgcacgtacgccgtggctaactacctcacgcgcggtatcttttgccccttcttcatcactgtgccaggtaataccaatatcaaacccctgctgcgccagtaataacgcgcactctttgccgatcccgctatcggaggcggtaataatcgcaacctgtgccatcgagttctccacttaacgctgaataaacgttaagtatagaaggcgcatatcatcagcgtttgtaccccccgcccaacgcaccagtgagttgaatggaggcatccagccactgcccttgcaataacaggccattggcccgctcacgcagcgcggggattctggcttcgctgacgcgggaaccagcaatgatgcccgcgttaaagcgcgcctgcgcaagacctaccacacgcaaggcatcgcgctcaatttgcgcctgatgctggtttttctccgccagtgtctgaacctgactggctgcccgcgccacgtcattcaccgcttcaaccaccgctttgttgtagctggcgatagacaagttgctttcggcttttgcgatatcgagattggcgttaagacgaccactatcgaaaatgggtagcgtcaggcctgccgtaacgcccatttgctgcgcggaatgacggaacagatcgcttaagtgcaacgcatcctgttgcaggaaggccatcaggttgatgtcaggataaaatgccgcttttgccgcatcaatggtgcttaggctactctcaacgtaccagtgcgccgcctgcaaatctgcccgccgggccagtaaggagtaccccagttcatcaggaagctggcttgccactttcggcaacgcgaccggtttaagcttcaaactctttgtctggttatttgtaagtgcgcttaaccgtgcctcaataattttcattttccccgcgacatcgttgagctgctgccgggttttgctggcattaatatcggtttccacaccttcaacactagaagtaatcccgttctgatatagctggcgatcggtcgcgataatggtgttctgctctttttctatttgctgcaagaccgtgtttaacgccgcctgggtttgccactcccagtacaggcgggctacgctgccagccagcaattggcgggtttgctcgcgttccgccgcccgtgctttaaccgtacccaggcgggcagtaacctccgcccgattctttccccagatatcgagatgccagcccgccgttaagccaaaagtaccgttggtgtaccacgggccggtcgtacctgcggccggatcgttcagagcaaacggccccattaagccttctgcgctcattttttgccgctccatatccgccgaaaagtcgatctgcggaccatcctgagtggcaactgccttcgcctgggcttcagctagctgaatgcgctgttcagccacctgcatatccggtgcgttctgtagtgcattgttaattaaggaagactgttgattatcgtgatactccagccaccattggctgtctggccaaccattttcagcgccgtgggtaatgcggtgtcaacttgtgcagcgggcgtttgctggcttaacgcctggcgggtttcatgcataggcgcacacccggccagcatcagtaacagcggaaaacaggcgatggctggataaaaggaatcacgattcatgggggaataatcaggtaagaaaaggtgcgcggagattaccgtgtgttgcgatatattttttagtttcgcgtggcaatacatcagtggcaataaaacgacatatccagaaaaatatacactaagtgaatgatatcttccgatttatcttaatcgtttatggataacggcaaagggcttcgttttttcctatacttattcagcactcacaaataaaggaacgccaatgaaaattatactctgggctgtattgattattttcctgattgggctactggtggtgactggcgtatttaagatgatattttaaaattaattaatgtcatcaggtccgaaaataacgagaatatttcagtctctcatcctgttgcgctcctgtcatgtgcattgcttcatataatcactggcgcaaggagcgcgcagggggcggccaatcgccgccgccccctgcacccccgggctctggcgaacaaaatcgccgctgcgcggtgccctcggcttatcccttacggctaccgggtcgggcgcgaggtaacatccctgtaaaacgcgccctcagcccacatccatgtgggctgccccggccttcagggaacgcctcggcaattttgacgccaccaaacaaccgtgcggcctattgataaagagctaacacattgtcaaaaaacatcactatggttttttagagtttctcgatatcaattgcctgaatagcccttgcaatatcaggggaattattcaacacccgaacatgctgaaataattccgttgcttcatcgtattctttacgcaaataactcaaccactgtttaatccgcgcaacgtgatataacccggtatcgccctgcttttccagacgggtatatttttgcagcaaagcaaccacctccggccacggcattcgcggttcgttatattttaccacccggctcaggttgggaatattgagcgccccgcgaccaatcatcactgcgtcgcagccgctgatcgccatgcattgttgcgcgctctgccagtcccagatttcaccgttggcaatcaccggaatattcagccgctggcgaatatcgccaatcgcctgccagtcaatatgctccgcgcggtaaccctgctctttcgtccgcccatgcaccaccagctccgtagcgccagcctgttgaaccgcatcggcgatttcaaatttcttctcaccgctgtcccagcccagacgcactttcacgctgacgggcaaatgcgccggtacagcttcacgcatcgcttttgcaccctggtagatgagttcaggatctttgagtaacgtcgccccgccgccgctaccgttaaccgttttgctcgggcagccgcaattgagatccacgccccaggaacctaactccaccgcacgggcggcgttctctgccagccattgtgggaactgacctaacaactgcacgcgcaccagcgtaccagatggtgtccggctggcgttttgtagctcagggcaaatgcgatgaaagacttttaccggcagcagttgatccaccacgcggacaaactcggtgatgcacagatcgtagtcgttaacttcggtcagcaattcacgcaccagagagtcaagcactccctccatcggtgccagtaacacacgcatatcatcacccgcaaaaaaatgaggcgctatgttagcgcctatggtcagcggattaaaggtctgcaaagagggattgctgcaaactgcaatccctctctatgcttgatgtatgcctgagttcgctgcgcattgcgtaatgccggggagcgaaaaaataagcgctgatttcttaatgtgatcggtagcacgttttacgaattaattgtatgatgaatccatctcatctggggtgttgattatgagtaagacactgaacattatctggcaatatttacgcgctttcgtcctgatttatgcctgcctgtatgcaggcattttcattgcttccctgctaccggtaaccattccgggcagcatcatcgggatgctgatcctgtttgtcctgctggccttgcaaattcttccggcaaaatgggtcaatccggggtgctacgtactgattcgctatatggcgctattgtttgtgccgattggcgtaggcgtcatgcaatattttgatttgctccgcgcacagtttggcccggtagtggtttcctgtgcagtcagtacgctggtggtttttctggtggtgagctggagtagccaactggtacacggtgaacgtaaagtcgtaggtcagaaaggaagtgaagaatgatggcgaatatctggtggagtttaccgctgacattgattgtcttttttgccgcccgcaaactggcggcacggtataagtttcccttgcttaacccgttgctggtagcaatggtggtgatcattccttttttaatgctgactggcatctcttacgacagctactttaaaggtagcgaagtgctaaacgatctgctgcaaccggcggtcgtcgcgctggcctatcctttatatgagcagctacaccagatccgcgcgcgctggaaaagcatcatcaccatctgttttatcggcagcgtggttgcgatggtgacggggacttccgtggcattgttgatgggcgctagtccggaaatcgccgcgagtatcctgccgaaaagtgtcaccacgcctattgcaatggcggttggcggcagtattggcggtattccggcaatcagcgcagtttgcgtgattttcgtcggcatcctcggcgcggtatttggccatacattgcttaatgcgatgcgtattcgtaccaaagctgcgcgcggtctggcaatggggactgccagccacgccctcggtacggcgcgctgcgccgagctggattatcaggaaggtgcatttagtagcctagcgctggtgttatgcgggataattactagcctgatcgcaccgttccttttcccgattattctggcagtaatgggctaaaatttgcgatgcgtcgcgcatttttgatgtatgtttcacgcgttgcataattaatgagattcagatcacatataaagccacaacgggttcgtaaactgttatcccattacatgattatgaggcaacgccatgcatccacgttttcaaaccgcttttgcccaacttgcggataacttgcaatctgcactggaacctattctggcagacaagtacttccccgctttgttgaccggggagcaagtcagtagcctgaagagcgcaacggggctggacgaagacgcgctggcattcgcactacttccgctggcggcggcctgtgcgcgtacgccattgagcaattttaatgttggcgcaattgcgcgcggtgtgagcggaacctggtatttcggtgccaatatggaatttattggtgcgacaatgcagcaaaccgttcatgccgaacaaagcgcgatcagccacgcctggttgagtggtgaaaaagcgcttgcagccatcaccgttaactacacgccttgtggtcactgccgtcagtttatgaatgaactgaacagcggtctggatctgcgtattcatctgccgggccgcgaggcacacgcgctgcgtgactatctgccagatgcctttgggccgaaagatctggagattaaaacgctgctgatggacgaacaggatcacggctatgcgctgacgggtgatgcgctttctcaggcagcgattgcggcggcaaaccgtagccacatgccttacagtaagagcccaagcggtgtcgcgctggaatgtaaagacggtcgtattttcagtggcagctacgctgaaaacgccgcattcaacccgactctgccaccgttgcagggagcgttaattctgttgaatctcaagggttatgattacccggatatccagcgcgcggttctggcagaaaaagccgatgcgccgttgattcagtgggatgccacctccgcaacgctgaaagctctcggctgtcacagtatcgaccgagtgcttctcgcttaagcctggtgccggatgcggcgtgaacgccttgtccggcttgccagccctctcctggtgtcgaaattcccggcaaacagtttgccgtttcttgcgcaaaaccagcgggtaaagtagcctgatggaaattttccttagatcgagtctcctgcatgttaaagcgcgtgttcctcagcctgttagtcctgatcggcttgctgctgttgactgtgctcggcctcgatcgctggatgagctggaaaaccgcgccttatatctacgacgaattgcaggatctcccctaccgccaggtcggtgtggtgctcggaacagcaaaatattatcgtactggcgtaattaatcagtattatcgctaccgcattcaaggagcgattaatgcctataacagcggtaaggtaaattatctattactgagcggcgataacgcattgcaaagttataatgagccgatgaccatgcgcaaagatttaatcgctgctggtgtcgacccaagtgatattgttctcgattacgcaggctttcgtacgctggattccatcgtgcgtacacgcaaagttttcgatactaatgatttcattattatcacccaacgtttccactgtgagcgagcattatttattgcgctgcatatggggattcaggctcagtgttatgccgtaccgagtccgaaagatatgctgagtgtacgtattcgtgaatttgccgcccgtttcggtgcgctggctgacctttatatttttaaacgtgaaccgcgttttttagggccgctggtccctattccggctatgcaccaggtaccggaagatgcgcaggggtatcccgccgtcacacccgaacagttacttgaattacaaaagaaacaaggaaagtaattatggatgtacagcagttttttgtcgttgccgtttttttccttatcccgatattttgtttccgcgaagcatggaaaggctggcgcgcaggcgcgattgataaacgggttaaaaatgcaccggaaccggtgtatgtctggcgagcaaaaaatcccggactctttttcgcttatatggtggcatatatcggcttcggaattttatctatcggcatgattgtttatcttattttctatcgttaatattcccctctccagttaattattgagaataattattacttcacctgataagctgcggatatcacattcctaaccgcagctatttgtgaatcttttcacagtttaaattcccccgcacgcttagccttaatatcagtacattattatttactaaacgctcgccttaattacctatagcattaaggaagatcacatgccgcaacaaaattatctggatgaactcactccggcttttacgtctttactggcgattaaagaagcctctcgctgtttattatgtcacgacgctccctgtagtcaggcttgcccggcacagaccgatccggggaaatttattcgcagtatctactttcgtaattttaaaggcgctgccgagacaattcgcgaaaataatgccctcggtgccgtttgtgccagagtgtgcccgacggagaaattatgccaaagcggttgtacccgtgccggtgttgatgctcccattgatatcggccgcttacagcgttttgttactgattttgaacaacaaaccggaatggaaatttatcagcccggtactaaaacgctcggcaaagtcgcgattattggcgcaggtcctgccggattgcaggccagtgtgacactgacaaaccagggttatgacgtcacgatttatgagaaagaagcgcaccccggtggctggttgcgtaacggtattccgcaattccggttaccgcaaagtgtgctggatgcagagatcgcccgtattgaaaaaatgggcgtgaccattaagtgcaacaacgaagtcggtaacacactcacccttgagcagctgaaagcagaaaaccgcgcggtactggtcaccgtggggttaagtagcggttccgggctaccgctgtttgagcatagtgacgttgagattgccgtcgacttcttgcaacgtgcacgacaggcgcaaggcgatatcagcattccacaaagcgcattaattatcggcggcggtgatgtcgcgatggacgtagccagcacgctgaaagttctcggctgtcaggcggtaacttgcgtagcgcgtgaagagttagatgagtttccggcaagcgaaaaagagtttaccagcgcccgggagctgggcgttagcatcatcgatggattcacgccagtagccgtggaaggcaataaagtcacgtttaagcatgtacggttaagcggcgaactgacgatggcggcagataaaattattctcgccgtcggtcagcatgccagactagatgcctttgcggagttagagccgcagcgtaacaccatcaaaacacaaaattaccagacccgcgacccgcaagtctttgctgctggcgatattgttgagggtgacaaaaccgtggtctatgccgtgaaaaccgggaaagaagccgccgaggcgattcatcactatttagagggagcttgcagttgttaaattaatatttagagggagcttgctcatgttaacgaaagatcttagcattactttttgcggcgtgaagtttcccaacccgttctgcctctcttctagcccggtaggcaactgctatgagatgtgtgccaaagcctacgacacaggttggggcggtgtggtgtttaaaacgatcggcttttttatcgccaacgaagtcagcccgcgttttgatcatctggtgaaagaagataccggttttatcggcttcaaaaatatggagcagattgctgaacatccgttggaagagaatctggccgccctgcgtcggctgaaggaagattacccggacaaagtattgatcgctagcatcatgggggaaaatgagcagcaatgggaggagctggcgcgcctggtgcaagaagctggcgcggatatgatcgagtgtaacttctcctgtccgcaaatgacttctcatgcgatgggtagcgatgtcgggcaaagcccggagctggtagaaaaatattgtcgggcagtgaaacggggttccacgctgccaatgctggcgaagatgacgccgaatatcggtgatatgtgcgaagtggcgctggcggcgaagcgcggcggcgcagatggcattgcggcgattaacaccgttaaatccatcaccaatatcgatcttaatcagaaaatcggtatgccgatcgttaacggaaaaagcagtatttccggatattccggtaaagcggtaaaaccgatcgccctgcgcttcattcagcaaatgcgcacccatccagaactgcgcgatttcccaatcagcggtatcggcggcattgaaacctgggaggatgcggctgagtttttattgctcggcgcagcaacgttacaggtgaccaccggcatcatgcagtacgggtatcggatagtggaagatatggcaagcgggttgagccattatctcgccgatcagggatttgatagcctgcaggagatggtaggtctggcgaataacaatattgtcccggcggaagatttagaccgcagttatattgtctatccccgtatcaatcttgataaatgtgttggctgtggacgctgttatatttcctgttacgacggcggtcaccaggcgatggaatggagcgagaaaacccgcacaccgcattgtaataccgagaaatgtgtgggttgtctgctttgtggtcacgtctgcccggtgggttgtattgagctcggggaagtgaagtttaagaaaggcgagaaagaacacccggtaacgttgtaaaaccagagacgcatccggcatttggttcctgtcgccggatgcggcttgaacgccttatccggcctacaaaaccatacaaatcagtatgttgagcttattgtaggccggataaaacgcgccagcgttgcatccggcatttggctcctgttgccggatgcggcgtgaacgccttatccggcctacaaaaccacacagatcatgatgttatgtgcgtttatgaccgaatgcggaccacattcacatcatttcttacgcgcgtatttcagactatccagcgctacggcgaagataataatcgcccctttgatgatgtactgccagtatgggtttacgccgatatacgtcaggccatagttgatgacggtaaaaataattaccccggtcaccacgccaatcaccgtccccacaccgccgctgaagcttacaccgcctaccacgcacgccgcgatagcatccagctcatacataaagccgaggttgttggtggcagagccgatacgtccggcttctaacatcccgccaaaggcatagaacacgccagacaacgcgtagatcatcagcaggttcaggccgacgttgacaccagatacttttgccgcttccgggttaccgccaatggcaaaaatgttcttaccgaagcgggttttgttccacaacacccagacgaacgccaccgcaatcaacgcgtagaaggtgatgtaagagagacggaaactccccagcgcgacaaagccctgagcaaaggtagagaagccactgtcaaaaccagaaattgggctcgccccgacaaagtcgtaatagaggctgttgatgccatagacgatgatcatcgtgccgagcgtggtaatgaacggcgtcacgttgagataagcgataatcagaccgttgatcaaaccgatcaccgcaccaatggcacagacaatcagaataaccagcgcaatcggcatcgtcgccatttccgggaacactttgttggcgttatccatggactgcaataatgtcgcagccaccactgccgccagccctacctgacgaccagcagaaagatcggtcccctgggtgacaattaaccctgccacaccgagcgcgataataatacgcacgctactctgggtgagaatattacttaagttcaacagacttaaaaatgttgggtcctggaaaataataatcgccagcaaaactaaaagaacgacgtaaataccgccctctttcaggtaagtaagaaaacttttcttatttaacgcactcatgggaagcccctaatcttaaaggtgcaaagacgcaagacgcagaatttcgttttgcgttgttgtttttgtatcgacaattccggaaacgagaccattgctcatgaccagaatacggtctgttatccctaacaactcaggcatttcagaggagataataataatccccttgcctttcttcgccagttcggcaattaactgataaatttcaaacttcgccccgacatcaataccgcgcgtcggttcatcgagcattaatatttctggttgcgttagtagccagcgaccaataatcaccttttgctgattaccaccggagaggctaccaatttgcgtccgatgacccggcgtttttacccgcatgctatcaatcacccactgggtatcgcttttcatccggctgttatccagtaaaccaactttatttttgtagttgcgaatattggaaattaagctgttaaaaccaatatccagataggcataaattcccgtactgcggcgctcctcagttaccagtgcaaatccatggtttatggcttcgttggcattatggttattgatctgtttgccgtgcaacgttatggtgccagcgcttttctcgcgaataccaaataacgtctcaacaatatcggtacgtttcgcccccaccagaccggcaataccgaggatctcccctttatgcagatcaaagctgacatcgcgaatgctcggctggcgcagactcgtcaggttacgtacctcgaggatgacttcgcccggtttgttttctttgtcagggaaacgctggttaagagaacgcccaaccatcatggcgatgatcttgtccatcgtcagtcctgccagcggttcggtggcgatccactgaccgtcgcgcaatacggtaacttcatcacataactggaagatttcttccattttatggctgatataaacaataccgcagccgcgctcttttaatttacgaataatagtgaacagatgattgacctctttttcggttaagctagaagtcggttcatccataatcacaattttcgcgttataggaaaacgctttggcgatttcgatcatctgcatttggctaacggataatgtgccgacgcgcgcacgcggatcgatatcaatatccagttcgtcaaaaatcgctttggtttcgcggtacattttgtcctgatcgacaaacatgcctttggtgggatatcgccccagccacatgttatccatcacgctacgttgtaataccaggtttaactcctggtgtaccatgctaataccattttccagggcttcttttgcagaatggaaatcgatctctttaccctggaataaaatggtgccggagtctttttgataaataccaaacaggcattttaataatgtgctttttcctgcaccgttttcccccattaatgcatggatagaatgtggccggacttttaaattaacgttatcaagtgccttaacaccaggaaaggacttgttgataccgctcatttccaacaagtattccccggaggacggagtcgtactgctgaccatataattttaccttgttggccatacaataagggcgcagtaatagactgcgcccaatcagtcttatttcttgctgaattcagccaggttgtctttatctacgccaacataaggtacgcggaccactttgttgtcgattttccagttggtgccatcagccgcacctttaccatcggccaggtttttcgccagatcaaaggtcgctttcgcctggttgttagcatcgttcagtacggtgcccgccagtgcaccggatttcaccagcgccagcgcttctggcagcgcatcgacgccaaacaccggaatgctggacttgttgtgtgctttcagcgcttcaaccgcgcccattgccatcgcatcgttgttggcgataaccacttcgattttgttggcgttcgggccagacagccaggcgtccatcttatctttcgcctgagcggtgtcccacattgcggtatctaactgtaactgttcagttttgatgcctttatcgttcaattctttaatcacgtaagtggtacgtgcttctgcatccggatggcccggttcacctttcagcagtacgaactgaatctgaccgtctttgttcagatcccaaccctgattcgccgcccagtgtttagcaatcaaatcgccttgaataatgccggactctttggagtcagtgccaacgtagtaggctttgtcgtagctatccagcgccttacgagacggttctttgttgaagaaaaccaccggcacgttttgcccacgcgctttctcaatcaccgtacccgcagctgccgggtcaaccaggttgattgccagtgccttcacccctttcgccagcaatacgtcgatctgatcgttctgcttggactggtcattctgagaatcattcatcagcagctgaacatctggcgcggctttcgcatcttgctcaatagccttgcgcactacagacataaagttatcgtcgtacttatagattgttacaccaatgcgagtatcagcagcgtgtgcagcggcaccgaataacatgctggccatcacagcagacagggttaacaccttcttattcatggtatctccggtttttcttatgcagggtagtgcttgagataaatgctcggcggggcagtagagttaatgaagtgttactgaacgccgaagctcactttttaaaattcgttcttccatgcccggtaacgctccagaaaacggctttaattgttgttatgacgctgttacctcggcaaaagtgattattcactgttacatacgggttacaacgttaaaacggtgcaatcatagctatcacattgttaagatactgtgaaatcactcacagattgaaagcggttacatcgcctgatttgtactgttagtgatcgccgccgcattctggcgtgttgcgacagaatggcgacgcactaacgtcggcataaaacagtggctggcacgaggatcaatattgcctgctgccccctgcaaggccagttcggtggctaatttcgccatactagcaatgggataacgcacggtcgttaattgcgggtcggtgtaacgggcgatgggaatatcatcgaaaccgatgatactgagatgtaacggaatcgcaatgccattatcttttaatgctgtcagtgcgccagcggccatattgtcgttataagcaaatacagcggtaagttgtagattgcgccccagcagttcaaccatcgccgcctcaccgcccggcatgtccggcgtaccagcgccaatccagctttccggcggaataatatcctgctctttcaacgcactcatccagcctgctttacgcatggcgtcatcttcaatgccgtggctggaagaaagataaccaatacgttgatgaccgttattcagcaacatgcgcgtcgccattcgggcaccgctgagattatccaggcaaacgcaacgatgggcgtaccccggcacaacgcggttgattaacaccataccgggaatgttatccataaattgcgccagttcatcgtcactcaatgctttactgtgaacaatcaacgcattacaacgctggcgaattaacacctcaatggcgtgacgctctttttccgcttcatgatagctattgccgattagcacgtatttctgatgctgctgagcgaccagatccaccgcttttaccagcgcgccgaaaaacgcatcagaaacgtccatcaccaccacgccaatggtgtcgctaacctgagttgccagcgcctgggcattggcgtttggccgataatccagctcactcacggctttcattactgcttcacgcgtgtcggcactgaccagcgtgctgttattgagcacccgggaaaccgttgccacagagacgccagcctgacgcgctacatcacgaatggtgatcatattcactacctgttatgagattgcagtaaatgactgcttgctggcggctattttgtcagcactgaatacaggacttcgtgaatcgagtcacagcaatggaaacggttacagccgttttgttaacgaatgtgatccagatcgttatctacttgttttagatattgccggtccggcagcacgcaaagttaactgacgccagagccattccaccggcccctggcggaagtaacgcagccagataacagagaagaggatattcgccagccataccggaataacaaacgccagcagctccaggcggtcaaaatgcataaacaaaccgaggtggtaaaaaagcgtggtacaaatcagcgtttgcaatagatagttggtcagcgccatccgtccgacgcaggcgatcgcaagcaccagcttaaagcggctcaattgcggccagaagccataaaacaggctcgcatagccaatcgcctgaaacggcgcactcagttcccgcggcatttgaagtaagaaggcacaccagcgatacgcccagtccagctgccattgcagggcgatggcaggaaggttaatggtcaccccaatcgccaccagcacaaaaccagtacgacgatagtgacgtaagctgaactgccctttcagccagccgctgcgcatcagcgccgcaccaatgagcatcatccctgccagttgccagccatactgtgcgcccagtgccagtaaactgttgccaacaccatcggcacgattactgatcgcttcaacgccgccgtgaagcttccagtatttttcatacaaaatagcgcttgcatccggcgtccaggcgcggctggtctggctgtcggaaatcagccccaataacagcaaaacgccaagccccaccagataaagcatgacgcctgtattaaacaggctttttacgcttggcgcatcgcgcaccagccgccagcagattaagcccaccagcccgtaagccagcaaaatatcgccgtcccagaacaataaaccgtgaataaagcccaacaagactaacagcgttaaccggctctggatccagcgtctgccacggggcagcaacatttgcaggcccgcaccaaacagtagcgcaaaaagcgtgaggaatttcacctggccgatgagatcaagaaatgcccaagtccatgcatcccgcggcgtaatagcaccgtaccaggcgggattgagataagccgcctttggtagcccaaaggcgctgatgtttaatagcaggatccccagaatggcgacgccgcgaacaaaatcgagcgtgacgttgcgctccatggttcctgccttttaatcagttgtgatgacgcacagcgcgcagaaactcgtggcgcgtattctgactggatttgaacaatccaccaagagaggtcgttgtcgtggcactggttgcatcgcggatgccacgcgccttcacgcagtaatgcaccgcgtcgatgctgacagccacgttattggtgcccagcagcgtttgtagcgcaataagaatttgctgcgtcagacgttcctgcacctgcggacgctgggcaaagaactgcacaatgcggttaattttactcagaccgatcacgctatctttcgggatataggccaccgtcgctttgccatcgatggtaacaaaatggtgttcacaggtgctggtcagagtgatatcgcgcacggtgaccatttcatcgaccttcattttgttttcaatgagggtgattttcgggaaattggcgtaatccagaccggagaaaatttcatcgacatacattttagcgatgcgatgcggcgtttccatcaaactgtcatcagccaggtcgagattcagcagctgcatgatttcggtcatatgaccagcaataaggcttttgcgcgtttcgttatccatttcatgcacgggcgggcgcagcggtgtttccagtcctcgcgcaactaacgcttcatgaaccagggccgcttctttactgagacttggcatttatgatttctcctgcaggtgtgacgcctccgccctgcgtgggggcaaagttattaagctgatttacagcctgattattgtgcgtgaggcggcgcacataatccagtattcacagcgataattattgtaattgccgctgcctttcatcagcagatgttaaaacatcgttatgcaaatacggaagtgaaagttactcacagcacattgaataaacggtatgatgaagaaattgcaaacaacacaacaaggagccacgcatggaaatgctcgaagagcaccgctgttttgaaggctggcagcaacgctggcgacacgactccagtaccttaaactgcccgatgacgttcagtatctttctccctccacctcgtgatcacactccgccaccagtgctgtactggctttccggattaacctgcaatgacgagaacttcaccaccaaggcgggtgcccagcgggtagcggcggaactggggattgtactggtgatgccagacaccagcccgcgcggcgaaaaggttgccaacgacgatggctacgatttaggccagggcgcaggcttttatcttaatgccacgcaaccgccgtgggcgacgcattaccggatgtatgattatctgcgcgatgaattaccggcgctggttcagagccaatttaatgtcagcgaccgctgcgccattagcggtcacagtatgggtggtcacggtgcgctgattatggcgctgaaaaatccgggtaaatacaccagcgttagcgcctttgcgccaattgtgaatccgtgcagcgtcccgtggggaatcaaagcgtttagcagctatttaggtgaggacaaaaatgcatggctggaatgggacagttgcgcactgatgtatgccagtaacgcgcaggatgcgatcccgacgcttatcgatcagggcgataatgatcagtttcttgccgaccagttgcaacctgcggtactggcagaagccgcgcgccagaaagcgtggccgatgacgctgcgtattcagccgggatatgatcacagttactacttcatcgcctcttttatagaggatcacctgcgcttccatgcgcagtatttactgaagtgaaagtccgcccggttcgccgggcatcttctcatcagaagcgataatccactgccataaagtaacgacgtccgtcttcgttatagctgtagtcgtcacgactgagatccttgtcgccaaggttcagcacgcctgcgcgcagtttgacgtctttagtcacctgccaggccgcgccggtattccagatggtataaccgcccggtgttttagccgtcgcgctgtcggcgcgtttctgcccggtatagtgcccagaaacatagaaactccagtcttccagcgccagcggtttccagtccagcgtaccgttagcagtatggaacggcagatcggatagcggtttgttttcgccgttgctgacatcacgaccatcgttgtaggtgtagttgatgctcagtttccattcatcgttgaacggaattttcagttcggtttccacgccctgaatacgagctttgttaacgttgtagtagctaaataccggtatgcgccgtccgttagcgcccgtctcaaaaccaacaaagttttggtagcccggtgcagcgttgacgtcagacgtacggctgatgctgatacgatctttcacatcgttacggaaaacggtaacgctggattcaaccccttccagccagccttcttcacccatgtagtaaagccccagctcccaactttcgctggtttctggtttcagatccgggctacccacaatcttacatgcgccacggcaggaattgctcgtccagtcagggctaagttgcaacagagaaggtgctttaaatgccgtcgcccagccccctttcaccgttacggtgtcggtggcgttataaaccaggtaggcacgcggactccagtgttcaccgtaggtttcgtgatcgtccatacgcacgccggtcgtcagcgccagcggctcgaagatccgccattcatcttccacaaacagcgcgtactggctggcagacgttttggagctggttcccccggtcaggttcaccgcatcgctaagtttgtcgtgacgccattcaccgccaaccgtgagaaactgattaatcgccgtcagcggcaacgtgtatttgccgtcgaccgtattgctttcggaagttatcgggctgctgttgccagggtttttgttctcgactttctcaccgtagtatttcagttcgctggtgccgtaatcccaacgcccattatggctgacggagtagttctggcgttccaggcggtttttgtccaggctgtcggaatcacgatcctgacggtcgaaaccgtatccggcagtaaaatcgtgattttgattcggtgtccaggcaaattcgacattgccgtcgcggctggagaatccttcaatacgcggcgtttctccggtatcggtggtcgtactgttttgcgggtcatccttttcacgttttgccaggctgccgtaagctttcattcccagcacaccatcaattaatggtccactggtaaagaactgaccgttataggtgtcaccgcgatcgcgatgttcctgaatggtggtatcgacggtaacggtaccgctccatttctgaccgatttttttggtgatgatattcactacaccgccgagcgcatcggaaccgtacaggctgctcatcgggccacggaccacttcaatacgttcgatggaatcgaccgggatccagttcagatcgaaatcattgtggcggaagacggcattgcgggagttcacgcgtttaccgtcgacgagaatcagggtatagctgctgtccagaccacgaatactaacgcccttacggttatccccttcgttcgtcagttgtacgccaggcacttctttgaggacatccttcagattctgtaccggttttcgctgcaggtcttcctgggtaatgacgctgatactggcaggtgcatctttaagattttgttccacggaagatgcagtgacaaccatcgtttcgccatcatcatcgaccgctaacacaggccatgcacaagaaatagcggacaaacacagcccgacccgtacgaaagggttcaacctaaacattccatatctccatgaggtaactacgaaaataaaatgggttatcgctcacatcttcttcacgtccccttgcgtacggcagcatcgcggtggacttattttttatgcaggtgatcatcccagaaagccggaacagcctctgatttgtcagccttttttgattgcggcgtaacgataatgcaaacgataacaattatcaatccaaatgttaaattttatatccgcatgatttgtcagggaaatggaattgaaaaagccctctcggttgagagggcttagcaaggaagggaggaaacttatttcttatcgttctgcgggaacttcatttcgctgtagcgtacgaagtgagttcctttaatcagcttgtagccgaaccaaataatcaggaacagcgggataccaatatacgttgccgctacgccgccccagtcaatagtatctttcaggaacgcttcgtagttctggcccaaagtgataatcagacacagaatgaatgcgaagatcggccccagtgggaagaaaccactacggtacggcagatcgttaatgtcgtgtccctgcaatacgtaaccgcgacggaagcgatagtggctaatggcaatccccagccaggcgataaaacccgtcatcccggaggtgttcagcagccacaggtataccgtctggttgccaaacatggaggtcaggaagcacagaccggcaatcaccgtcgtcgcatacagcgcattacgcggcacgccaccacggctcagtttagcgaaaatgcgcggcgctttaccgtcacacgccagggtgtacagcatacgagtagacgcatacataccggagttacccgcactcagcaccgccgtcagaataactgcgttcatcaccgccgccgcagagagcagacccgcgtgctggaacaccagggtgaacggactaacgctgatgtctttaacatcgttacgcagcaggctcggatcggtgtacggaataatcaggctgataatcaggatcgcgaacacatagaacaacaggattcgccagaacacctgacgtaccgcgcgtggaatgtttttcgccggatcttcggactcgcctgcagcaataccgatcagctcggttccctggaaagagaagccgacaatcatagctacgccgatcatcgccgcaaaaccaccagcaaacggcgcttcgccgattgtccagttgctccagcccgcaggctgcgcgcctttgaagataccgataatcatcagcacgccaacgatgataaagacaataactgtcgtgactttgatcagactgaaccagtattccgcttcaccaaagccacgaacactgatgtagttcagcaggaagataacgccgaggaacaacgcactccagatccagcccggtgtatccgggaaccaccagctcatgaccagctgagctgcaaccaggtcaacggcgatagtcaccgcccagttgtaccagtagttccagcccagcgcgaagccaaagccttcttcaacatagttctgaccgtaagtggcaaagctaccggaaaccggcatatatgcagccagttcaccgagactggtcatcaggaagtaaaccatcaggccaatcagcatatagctgagcaatgccccgcccggacctgcctgagaaatcgttgcgccagaggcaacaaaaagacctgtaccgatggaaccgccaatggcaatcatcgtcaggtgacgcgcctttaattcacggcgtaagcccggcgcttctgtggttttagtttcggaaaccatacaaaaatgctatccatcttaaaaatgaggcgcgattgtagcagacgattggcaatccttccggcagaaatacacggttataagacaccttcatgatcgcccagggattataagtaaagcagccaatctcttttctggcgaatgcatgctgaaggcgctgcgtcacgaaatcgacacagcaccagcatgttcttgtacagcaacttaacgcggcacatttgcgggatcgcaatagtccagaaagcgccgtagcgcgttggaaaggtgtttttgccgatgatgtatacgccacaacgtacgcatcaggcgcggcagagggaccgcaacttcacttaatgtgcctgcctgcaattgatcttcaatcacacgtcggctcaggcaactaattcccaacccatgacgcaccgcatgtttgattgcctcggagttacctaattccatcgccatctcaaacttcggtaaatgactcagcaacagataatcgacaatctcccgcgtgccggaaccgcgttcacgcaggatccacggcgcagcggccagctgttctaaggtgaccggaccacgggccaacgggctagtcggcgcggcgaaaaccaccagctcgtcttccagccacggttcagaaatgatttcagtgctgtggcacggtccttcaataaagccaatatcaacgcggaaatccagcaccgcttgcatcacgtcctggctattcccaacgctaagttcaatcggcaactgcggataatcatggcgataacgggcgataactgcaggcagaatgtagttaccgatggtactactggcatagatacgaatcgcgccgttgtcttcgcgaaacagttgttcgatttcaaccgcctgttcaagcaatgccaacgcacgcggatagagcagccgcccgtgttcattaacaaccagtcttttccccacgcgatcaaacagttgcacgccaagctgcccttccaggtcggtcaaggctgcgctcactgcactttggctcaacgccagcatcacgctcgcctgggtggtacttccacttttcaatacttctgcaaaaacttccaactgccggagggtgatgtgcatagtcgcttaccacttataaagattaattataaatatataatcaattttatttttaaaccagttagtcgtaaccttatgcccggttaaaggagagggttatgacgaatatcaccttacagaaacaacatcgtacactgtggcattttattccggggttagccctgagtgcagttatcaccggggtcgccctgtggggtggttccattcccgcggttgcgggtgccgggtttagtgccctcaccctcgcaatcttgttggggatggttttaggcaacaccatctatccgcacatctggaaaagctgtgacggtggtgtgctgtttgccaagcaatatttattacgtctgggtatcattctttatggcttccgtctgacgttcagccaaattgccgatgtcggtatcagtgggatcatcattgacgtgttgacgctgtccagtaccttcctgctggcttgcttcctggggcagaaagtgtttggtctggataagcacaccagctggttgatcggtgccggtagcagtatctgtggtgctgccgcggtactggcgactgagccggtagtgaaagcggaagccagtaaagtaaccgtggctgttgcaaccgttgttatcttcgggaccgtcgcgattttcctctacccggcgatatatccgctgatgtctcaatggtttagtccggaaactttcggtatctacattggttctactgtgcacgaagtggcgcaggtggtggcggcaggtcatgccatcagcccggatgcggaaaacgcagcagttatttccaaaatgctgcgcgtgatgatgctggctccgttcctcatcctgctggcggcgcgtgttaaacagctgtctggggcgaacagcggcgagaaaagcaaaatcactattccgtggtttgccatcttgttcatcgtagttgccatctttaacagcttccacctgttaccgcagagcgtggtgaacatgctggtaacgctggataccttcctgctggcaatggcgatggcggcgctgggtctgaccactcacgtcagcgcgctgaaaaaagctggggcgaaacctctgctgatggcactggtactgtttgcctggctgattgttggtggtggtgcgattaactatgtgattcaaagcgtcatcgcataaaccactacatcttgctcctgttaacccgctatcattaccgttttcctccagcgggtttaacaggagtcctcgcatgaaatacattggagcgcacgttagtgctgctggcggtctggcaaatgccgcaattcgcgccgccgaaatcgacgcaaccgcgtttgccttgttcaccaaaaaccaacgtcagtggcgtgccgcaccgctcacgacgcaaaccatcgatgaattcaaagccgcctgtgaaaaatatcactacacaagcgcgcaaattcttccccacgacagttatctgattaacctcggacatccggtcactgaagctctggaaaaaagccgcgatgcctttatagatgaaatgcagcgttgcgaacagctggggctttctttgctcaacttccaccctggcagccatctgatgcagattagtgaagaggattgccttgcgcgtattgccgaatccatcaacattgcgctggataaaactcaaggtgtgacagcggtgatagaaaacaccgccggtcagggcagtaacttagggtttaaattcgaacatctcgcggcgattatcgacggcgtggaagataaatcccgcgtcggcgtctgcattgatacctgccatgctttcgctgccgggtatgatttgcgtactccagccgaatgcgagaaaacattcgcggattttgcccgtactgtcggctttaagtatctgcgcgggatgcaccttaacgatgcgaaaagcacctttggcagccgcgttgaccgccatcatagcctcggtgaaggcaatatcggtcatgatgcgttccgctggatcatgcaggacgaccgtttcgacggcattccgctgatcctcgaaaccatcaacccggatatctgggcagaagagatcgcctggctgaaagcgcaacaaactgaaaaagcggtagcctgaagatgaataaccgggaaaaggagatccttgcaattttacggcgtaacccgctgattcagcagaacgaaattgcggacatgctgcaaatcagccgtagccgcgttgcggcgcatattatggatttaatgcgcaaaggccggattaaaggcaaaggttacattctcaccgagcaggaatactgcgtagtggtggggacaatcaatatggatattcgcgggatggcggatatccgttacccgcaaagcgcttctcatcccggtacaattcattgcagtgcgggcggcgtgggacgcaacatcgcccacaatctggcgctgttaggccgtgacgtccatttgcttagtgtgattggcgatgacttttatggcgaaatgctcctggaagaaacgcgccgtgccggcgtgaatgtctccggctgcgttcgtttgcatggtcaaagcacaagcacgtatctggcaattgccaatcgagacgatcaaaccgtgctggcgattaacgatacccatctgctggaacagttgacaccgcaactactgaacgggagccgcgatttacttcgtcatgcgggcgtggtactggctgattgcaacctgacagccgaggcgctggaatgggtctttaccctcgctgatgaaatcccggtgtttgtcgataccgttagtgaattcaaagcgggcaaaatcaaacactggctggcgcatattcacaccctgaaacccactttaccggagctggaaattttatggggacaggcgatcaccagcgatgctgaccgtaataccgcagtgaatgcattgcatcagcaaggtgttcagcaactgtttgtttatttgcccgatgagagtgtttattgcagcgaaaaggatggagaacaatttttgctgaccgcgccagcgcatacgacagtagacagttttggtgctgacgatggttttatggcgggcctggtatatagctttcttgaaggatacagtttccgcgacagcgcccgttttgcggtagcctgcgcggcaattagccgcgccagcggcagcttaaacaaccctaccctgtctgccgataacgcgcttagtttagtgccaatggtgtaacaatgttgccggatgcgacgcttaacgcgtcttatccggcctacaaatcaggcaatttcagcaagtaaatgtaggcctgataagcttgcgcatcaggcaatgacactcaagctaaaccaataaagaacccggcaatggtcgcactcatcaagttggaaagcgtcgccgccgccagcgcccgtaaaccaagctgggcgatttccggcgcacggtgtggcgcaaccgcagaaaacgcccccaccaccaccccgatagaaccaaagttagcgaaaccgcacaacgcgaaggaaataatcgccacagttttagcatcgagagtgccagccgtttgcagatagggactgaaattgagataagcgacaaattcatttattgccagtttctgtccaatcaaactcccggcaagattcgcatcactccagtccacacccatcacccacgccagtggagccagcaggtaacctaaaatggactccaggctggcatgttcaaaaccaaaccagccaccaacgccgccgataataccgttaatcaacgcaattattgcaacaaatgccatcaccactgttgccacacctgcggcgattttcagcccggtcattgcccctgtcgcagcggcttcaataatgctttttggcggtgtttcggtgaaagagaggttattaaaggaaacctggctagattccgttgccgggcttaacaggcgggcaaacaagatcccgccagggatcgccattaaacttgccgccagcagatattccacaggcacgcccagtgcggcgtaaccaatcattgtgctaccagcaatgctggccatgccactacaaatcgctgtaaataattcattgcgattcagacgatcgataaagggtttgacgattgccggaatttcgttttgcccgaggaaaatggtggtgaccgcgacgaaactctcgatcttgctgatatttaatgctttctggaagataccgccgagaattcgaattaaaatccccatcacaccgatgtagtagagaatactcaccagcgcggtgacgaagataattgccggtaacaccctgaaaccaaagataaatcctgcaccatcaaataaggtatccattttcggtccgaccagagaaccgaagataaatgcgctacccgcgtcgctgtacgccatcactttatgcacgccaaaagcgactttttcagcgacccaacgccctggcggtaaccaaagcataatgccgccaatcacgacctgtaacactaacgccgcgccaacggtacgcaggctgatcttcttcttgtttacactcagtaaaaacgcaatcgtcagcaataccaccattcccagaacacttctcatgacatccatagtgattatctcttcatgtcatattgggcgacggctttctgcccatcagaaatagccaggcctgcatcttgcgataccggcccggcttgttatcaacacttaatgggttttgatgtagccgcgcacgcactcttcgactaatccccagaaccagtctgtatcaatagtgatgccgactttggtattggcgggcttgccaagaacgcccagctcgtcgcagacggtacgcccatagcaagggccactgttgacgtccacttcgacgtacatctcctgggttttaatgccatcagggttaatcagataaccgatgcaggtggcgtcgtgcaccgggccgccagcaaggccgtagttttcgaactgcgttttgagagtgaagttcatgatgtcgctgaacagctctccggcggggccgcctgccctttccatccgagcaatcacgtccggggtgcaaacggtctggttggtgagatcgaggcccatcatcactaatggaacgccggaggtgaacactacgcgtgcggcttccgggtcggcaaagatgttgaactcggcagatggcgtgaagttgcctgtaccgtaagcgccgcccattagcacaatttcacggattttgggcaggatcgcgggttgcatacgcattgccaccgcgatattactaagcggaccaaccggcaccagagtgatatcgccatcgcttgccatcagggtatcaatgatatatttcaccgcatgagtgctttctgcctggcgggtcagcggctcgaataccgggccatccagtccggtttcaccgtgaatattatcggcaacgatttgttgacgcataatgggctgcggcatccccgcataaaccggaacattaatctccagtttctggcaaacattcaggccattaattaatgttttatcaagcgtctgattacccgctacaatagtgatgcctaataaatctattgccggatgtttcgccgccatcattatagcaatagcatcatcatgacccggatcacaatccagaataatttttctcttttccattgtttatttcctctgtttccagttgcgttattttttctacagcaaagaaaattcgaccgggccgatgattgaatcttaacaacagcgtacgtatgctaaatatgagaaatctcatagcggataaacatcgtgaaagaaatccacaataatgatcttaagcagcaattgatgagtgaatccgcgtttaaggattgctttttaacggatgttagtgccgatacgcggctgtttcattttttagcgcgtgactacattgtgcaggaagggcaacagccgtcctggctgttttacctgacgcgaggccgcgccaggctttacgccacgctagctaatggtcgcgtgagcctgatcgatttctttgccgccccctgttttattggcgagattgagttaatcgataaagaccatgaaccgcgtgcggtgcaggctattgaagagtgttggtgccttgcgctccctatgaaacattaccgtccgctgttattaaacgacacgctatttttacgaaaactctgcgtcaccttaagtcataaaaattatcgtaatattgtttctttaactcagaatcaaagttttccgttagtgaatcgcctggcagcatttatattactcagccaggaaggtgatctttatcacgaaaagcatacgcaagcggcagagtatttaggcgtttcttatcgacatcttttatatgttctcgcgcagttcattcacgacggtttattaattaaaagcaagaaagggtatctcattaaaaacagaaagcagttgagtggactggcgctggagatggacccggagaataaattctccgggatgatgcagtaaaaattattttcaatagcgcgattgccggatgcaacgcttaatacgttttatccggtctacaaatcgagcattacgccagaccaataaagaacccggcaatagtcgcactcatcaggttggaaagcgttgctgctgccagcgcccgtaaaccaagctgggcgatttccggcgcgcgttttgggctaatagcgctaaatgcgccaacgacaacaccgatagaaccaaagttagcaaaaccacaaagcgcaaaggagataatcgcaatggttttcacttccagcgtgccgcccgtttgcaggtatggggagaaactcaggtaagcgacgaattcgttaatcgccagtttctgcccaatcaggctacccgcaagattggcatcactccagtccacacccatgatccacgccagcggtgccagcacatagccaaaaatactttccagagaggcattggcgaaaccaaaccagccgccaattccgccgataatgccgttgatcagcgcaataattgcgacaaacgccattaccaccgtcgccacaccagcggcgatttttagcccggtcatcgcaccgctcgccgccgcttcgataaagctttttggcggcgtttcgctgaagctcagattttcaaatgtgacctggctaggctcggttgccgggctaagaatacgtgcaaacaaaatcccgccagggatcgccatcaggcttgccgctaacaggtagtcaattggtacgcccattccggcataaccaatcatcatgctaccagcaatggacgccatcccgctacaaattgcggtaaacaactcgttgcgattcatgcgatcgataaacggtttaacgatcgccgggatctcattttgcccgaggaaaatagtagtaaccgcaacaaaagattcgattttgctgatgttgagggctttctggaaaatgctgccaaggatgcgaatcagcagccccatcacgccaatgtagtacagcagactgatgagcgcagtaacgaaaataatcgccggaagtacgcgaaaggcgaagataaaacccgcaccgtcaaacaggacatccattttcggcccaaccaggctaccaaaaatgaaggcgctaccggcatcactgtaagacatcactttatgaacgcctaatgccgcctgttctactgcccattttcccggtgggaagtagagcatgatgccaccaatagcgatttgcagcagcagtgcggctccaaccgtgcgcaaactgatgctctttttattcacactcaacagaaatgctattgccagtaacaccaccatccccacaacacttctcattatatccataatgattttcccttcatgccggtaaacccggcgtcagcgccaggttttggtatgcttgatgagtacgggcgacggctttctgcccgtcagaaattaacccgcgagacgctgatattctttggcaatttcgctcgccagaatggcgttgttgaacaccagctggatgttggatttcaggctgtcaccgccggtcagttcagcaacgcgcgccagcaggaatggcgtactttctttaccaatgactccctgagcttcagcttcagctaccgcctgatcgatcgccgcattgatagtgtgttccggcatagcaaactgttccgggatcgggttcgctaccacgaggccaccgttcagaccgctttgccatttcaccaccattgcacgggcaatttcgctggcgctgtcgagacgaatgctgacgtcaaacgggctggtgcggcagaaaaacgcaggcagcgctttagtctgatagccaattaacggcacaccgaaggtttctaaatactcagtggttaatcctaaatcgagaatagatttcgccccggcacaaacaacggtgacattagtatttgccagttcttgcaaatcggcagaaatatcgaaggtatgttccgccccgcgatgcacaccaccaattcccccggtggcaaatactttaattccggcaagcgccgcaataatcatcgtactagccacagtggttgcgccattttttccggcggcaacaacaaaaggtaaatcgcgacgactaactttggtcacgttatgcccttcacgacccagtaattcaatttcttctttgcttaaccccactttcatcacgccgccaataatggcgatcgtggcaggtacagcgccctgtttacgaatagtttcttcaacttcaattgcggtctgggcattttgtgggaacggcatcccgtgagaaataatggtgctttccagcgccacaaccggttttttgttttttaaagcgtcctgcacttccggggaaatttgtaataattcaggggaaatttttaattcagacattctgcgttctccactaagcttataacgttggcaatgcttaaatcggggttattggtgtattcacaggagagcgccatactgctacatccctgtgcgaaacgaacagattcggcaaacggcattccgtctacccaacagctagcaagtcccgccatcatggcatcgcccgctccggtaacattaataacattggttttgatcggcgcagaccagccactttcaccgctgatatcgctgtaataaacgccgtcgccgcccatgctcaataccagtcggttcaggccatgttgatggaaccaggcagcaacttttgccacatcttcacgcccactcagcgcaatcccactcagggtttccgcttcaaggcggtttggcttgagagtgtggatctgatttagacggtcgcgcactttgacacatttccatgcgctaaccggatcgacaaatacgggtacgttggcggcattatccagaatccatgccagtgcctcttcactgatattacagtccgcgacaatgacctttgccctctgaataaattcaccgtgctgtgcgagatattcagctgtaatagcgttgctaatattcatgtcatttatagcaaccagcatttcaccggtattatcgagtaaacttaaataactgctcgtattttctcccggcacaatcaggcatttatcgacataaacgccagattgattggtttgcgttagcaggctttgaccataaaaatcactgcctacggcgctcagtagccaggctttgttacccagcaacgccaggttttgtgcaatattgcgccctactccaccaggcgtaaattttattttacctggattactatccgcataatttaaactttcatgactatatccggcgacatcaatattcgcgctacctataattacgacataatccttttcgcgcatagcacgtcctctggtaaaaaattaccaaccctgtcaatccacaagaatatagatactgcaaagacggtttaaacatgtgttcatatttaaacatgtgctcatagtatgcatgttttacgtaaagtaaattaccgccagagaggcaaaatgggcagatttgagcaggctcacaaaatgcgattaaatgcctgaattacaaaagcgaggaatttgtgacgggatgcacagaacagaacaataaaaaagggcagaaaataatctgcccttgaggaaataacctgagtgtttgatgaacgtttgaagtttctactgaaagataaaaccatttaaattcataaaattacattcacaaaccggtcattctctttgcgctcatcaaatgttacaggacaggaaatttctgccctgtaacacaccttttattacgctgctttcgctactgcgtccacttccggacgtttcaggaaggcataggccaaacccgccaccagcgtaccggcaataattgctaccaggtaacccaataccggcgtaatagcgccagggatcagcagaacaaacagaccaccgtgcggtgccatcagtttcgcaccaatcgccatactgattgcgccagtcagcgccccacccacgatacagcacggcagcacacgcatcggatcacgagcagcaaacggaattgcaccttcgctaatgaagcacagtcccaataccagagcggctttgccaccttcctgctgcgctttgtcgaatttgcgacgcgccaccattgttgccagacccattgccagcggtggcaccatacctgccgccataatcgccgccatcgggccataggtttgagtactcagcagacccacaccgaatgcgtacgctgctttgtttaccggaccgcccatgtcagtacacatcatgccaccgaggatcgcccccagcagaaccgcattcgcagtccccatggtctgcagccagtgagtcagcccttcgagaatgccagcaactggtttaccgatcaggtagatcatcgccagaccgaccaccagactggaaattagcggaatgatcaggatcggtttcagcgcctccatactctgtggcagtttcaattgcgtactgattaacttcgcaatgtaaccagccaggaagcccgcaataataccaccaatgaagccagaaccggtgctgaccgccagcataccgccaatcagacccggagtgaggcccggacgatcggcaatggaaaaggcaatataacctgccagtaccggcaccatcagcgcaaaggcactaccaccaccaatctgcatcagcgccgcagccaacgtacccggctctttaaacgcttcgataccaaaagcaaaagaaagcgcgatacacagaccacctgcaacgaccatcggcagcatgtaagaaacgcccgtcagcaagtgacggtatgcgcctgcactctctttcttactttcagtggtcgccgtttgagctttgcccgccggttcatacggcgttgcttcagcaaccgctttatccagttcctgcgcggttttcttcagcgccagaccggtagaggtacgatacatcggtttaccagcaaatttcgccagatccacttcgatatctgccgccacaatcaccagatccgctgctgcgacttcttcgggagtgattgcattacccgcgccaacagaaccacgggtttcaactttcacccaccagccacgttttttcgcttcggtttcaatggcttcagccgccataaaggtgtgtgctacgccagtcgggcaagcagtcaccgcaactacgcgtttcggaccgctggcggcaactggtgctgtcgcagcgaccggcgcagtgtaaggtttcgcatggcctttggcttcactcaggaacagctcagggtgcgcaactgcccgggaaatatcgcccagccagacatttttaccgttcagcgcgctgtcgttcgggatggaatcaccgagaacaatcgccatttcagcgtcgttcggattgtcgatgatttccagttttgcttttcgcgccgccgcgcccagcagggtcttcgccatataggcgcgtgcctgaccgagattagcgtcaataatcagcagcgttttcattatgcctctcctgctgtcagttaaaaggttgtaagtcgacgcgcgccatcattgcggccaactgcggacgatcggtaatacccacattgctttgacttaccgccagggctgcaacagctgtcgccagacgcagtgtgtgttcactggattcacgcatcagcaagccataaatcaggccaccaaccatagaatcccctgcgccaacggtgcttacgacatcgacactcggtggtttggcgatccattcgccggaggcattaacccaaagcgcgccttcggcacccagactaataacaacatgcgcgatgccttgttcacgtagcgcatgtgcagcttcaatcacatctttcatttcaggcagtttacggcctgcccagatttccagctcgcggcggttaggtttcaccagccacggtgccgctttcaaacctgctactaacgcttcacggctactatcaaagataatgcaaggacactgactacgcaggcgagtcatccagtcggtgaacgcttccgggctgacgccactcggtaagcttccgctgacacagaccatatcgaactgaccgagccagctcagagaatcagtcacaaagcgttcccagtcggcgggggtgacttcaaaaccgctgaagttgaagtcggtcacttcgccgtctttttccgtcagcttaacgttaattcgggtgcgcccctgtacaacctggaaacggttggcaatgcccagctcgctgaacagttgctgaaaaccatcctgattgtctttacccaggaagccgccaacggtgacatcaattcccaggtcttttaatactttggccacgttgatgcctttacccgccgcatgcagaccggtggttttcaccaggttcacttcgccgcgttcaatttccgggcagaaaccaacaaggtcataagccggattaagggtgatagtagcaacacgtctgctcattatgcgccctccccaagaccagcagcgatagcgtcgccgattgctttcagcgcctgttcagcatctgcaccctgggcggtaaagcgtaggcgatgacctttcttaacgccaagtgccacaactttcatcagactacgtccgtttgccggtttgccggtaccatcaaggtttgtcacggtaatatcactgttaaattgtttaatggtattgaccagcatggtacctggacgagcatgcaggccgtgttcattgcgcaccacaaactccgcgcttaacacgtcgtcggtcggcgcatcatcgctggtcagcagcgccagcaacgttgccgcatccgctttcagcaagcggtcagctttattgtcgagcaataaatcagcgagacgcttaagaaccgcgatgggctgatcgtcattcatcgccacactcaccagcatggctgccgtttcgccgtccacatcaaaagcatttgccgcacggcttaccgcaatcgcgctacgcagattgccttcggcgctatcgctcagccagataccctgtccgagattcagcggttgttcattgatggctttggtgacgaaagtggcgtcaactgcccccgcctctttcagacgcgcagcgttcagcgcctgaagagtcagcagatcgctggcgacgatatccagtgtcagcatttcgttgtcgagcttcagctgctcactctgcttttcgcccatcagtaatgcgcgaagttcttctgctgttgttgcactcttcagttgttcagcaacggaatcatcgctcagtacgtgggtcagctggcgtagcaggcccagatgttcatcgctgctggcagcaataccgattgccacgtacgctacctgaccgtcaccccaggtgacgccttccgggaactgaaatacctgaacgccggttttcagcacctgatcgcgggtgtcggtagtgccgtgtggaatagcaataccattgccgaggaacgtactggtttgctgttcgcgcgccagcatgccattgacgtagccttctgctacattaccggcctgcaccagcgccgcagcgacctggcgaatcgcctcttctttgtctccggccttttcgcccggatggatgtcctgtacggataactggaacatagttctcctctcttgctgaattgaaacgattcagcctctatgagaaaaaaagcgccaacctggcttagggttaaagacaagatcgcgctgaaacgtttcaagaaagcataatacttctgtttcagcacgcaaggaaagccgtaaagttatgagcaaaagtttgatgtgctgcacaattttttgccatttttcctaattgctgatgggaaaatccgttatcagcaatttcatttcagcagcgtcagcagccaatcagcaacagtgaaatggcattttgactattcgtggcgcttttgatttcgctgtctgtttattttctgacaagcagcgtaaactccgcgtcttcctcttccagtgatcgaccagcatgcataactcccccgcagtctccagcgcgaaaagctttgacctgaccagcacggcgtttttaatcgttgcctttctcaccggtattgcgggcgctctgcaaaccccgacactcagtatttttcttaccgatgaagtacatgcccgtccggcgatggtgggattcttctttaccggcagcgctgtcattgggattctggtaagtcagtttctcgccgggcgctctgataagcgcggcgatcgcaaaagcctgattgtcttttgctgcctgttaggcgtgctggcctgcaccctttttgcctggaatcgcaactactttgttttgctattcgttggcgtctttcttagcagctttggcagcaccgctaacccgcaaatgtttgcccttgcccgtgaacatgccgacaaaaccggacgtgaggcggtgatgttcagctcttttttacgcgctcaggttagtctggcatgggtcattggcccaccgctggcttatgccttagcgatgggtttcagctttacggtaatgtatctgagcgcagcggtagcgtttattgtttgcggtgtgatggtgtggctgtttttaccgagcatgcgaaaagagcttccgctggcgaccggcacgatcgaagcgccgcgccgtaaccgtcgcgatacgctgctgctgtttgtcatttgtacattgatgtggggcagcaacagcctgtacatcatcaacatgccgctatttattatcaacgaactgcatcttcccgagaaactggccggtgtgatgatggggaccgccgccgggctggaaatcccgacgatgttgattgccggatatttcgccaaacgtctgggtaagcgtttcttaatgcgcgttgctgccgtgggtggcgtctgtttttacgcaggaatgctgatggcgcatagtcctgtcattctgttgggcttgcagctgctaaatgctatttttattggcattctgggcggcatcgggatgctctattttcaggatctgatgcccggtcaggcgggtagtgccaccacgctctataccaacactagccgcgtgggctggatcatcgcaggaagtgtggcgggcatcgtcgccgagatctggaattatcacgctgtgttctggtttgcgatggtgatgattatcgccactctgttttgcttactgcggattaaagatgtttaaggcgcggtcagcatttccagatcgataagccaggtcatggcctgctgacggctgttaccgcacatttcagcgctggcttgtaagcctgcacagactttcggtcgcagtgggctggtgaaaattttacagcgttgctgttcatcaagctgaatgcagggcgtattggcgggcttgccatctggcataccgggaatagggctggaaatactaggggcagtgcaacacgccccgcaacccggacggcattccatacgttgttctcttaaggttaaccaccggattgatgagcgcgcacagtaccaccttttttgcaccagcaaaagtgcgaataccacttgcccgaaaggcccgtcgcgagtactttgtcgcgatatttttgacattttcgactacaggaatttttcgatgccaagagcgaacgaaattaaaaaaggtatggtactgaattacaacggcaaactgctgctggttaaggatattgatattcagagccccactgcccgcggtgccgctacgctgtacaaaatgcgtttttctgatgtccgtaccgggctgaaagtagaagagcgtttcaaaggtgatgatatcgttgacaccgtgacgctgacccgccgttacgttgacttctcctatgtcgatggcaacgaatatgtctttatggataaagaagactataccccgtataccttcaccaaagatcagattgaagaagagttgctgtttatgccagagggcggcatgccggacatgcaggtgctgacctgggacggtcaactgctggcgcttgagctgccgcagaccgttgatctggaaatcgttgaaaccgcaccaggcatcaaaggggcatctgccagcgcccgtaacaaaccggcgacattgagcactggtctggtgattcaggtaccagaatacttaagcccgggcgaaaaaattcgtatccatatcgaagaacgccgttatatggggcgtgctgactaacttcagccgcatgcagaaaagggatagctcaggctgtcccttttttaatttattataccaatcttctattttgcgcttcctgaacaccttacgccctcaattttcactcgttgattgatcgccctcacacttcatcgcattaacaatccagaccaatttcaattgctgtcatataactttacactgtcgttgttaattaatcgttactaagacgtgactcctatgaatacaatcgcctccgttacgctcccgcatcatgtacacgctccacgctatgatcgccagcagttgcaaagtcgtatcgttcattttggctttggagcctttcaccgcgctcatcaggcgttactgaccgatcgtgtgctgaatgcccagggcggcgactgggggatctgtgaaatcagcttgttcagcggtgatcaactgatgagccagctccgcgcacagaaccatttatataccgtgctggagaaaggtgcggacggcaatcaggtgataattgtcggtgccgttcacgaatgccttaatgcaaaactggattccttagcggcaattattgagaaattttgcgagccacaggtggcaattgtttccctgacgattaccgaaaaaggctattgtattgacccggccaccggtgcactcgacaccagtaatccgcggattattcacgatctacaaacccctgaagaacctcactccgcaccgggtattctcgtcgaagcactgaaacgccgccgtgagcgcggccttacaccgtttaccgtgctctcctgcgacaatattcccgacaatggtcatgtggtgaaaaacgcggtgctgggaatggcagaaaaacgtagcccagaactcgccgggtggataaaagagcacgtcagttttccgggaaccatggtcgaccgcattgttccggctgcaaccgacgaaagtctggtggaaatcagccagcatctgggggtgaatgatccctgcgcgattagctgcgaaccgtttatccagtgggtggtggaagataacttcgtcgctgggcgtcctgcctgggaagtcgcaggtgtacaaatggtgaatgatgtcctgccatgggaagagatgaaactgcggatgcttaatggcagccactcttttctcgcttatctgggttacctcagtggattcgcccatatcagtgattgcatgcaggatcgcgcatttcgccatgccgccagaacattaatgctggatgagcaagcgccgacactgcaaattaaagatgtcgatttaacacaatatgcggataagttaattgcacgttttgctaatccggcgctgaaacataagacctggcaaatcgcgatggatggcagccagaaattaccgcaacgcatgctggcaggtattcgcatacatcaggggcgcgaaacggactggagcttgctggcattaggcgttgcaggctggatgcgttacgtcagcggcgttgatgatgccggaaatgccattgatgttcgcgatccgcttagcgataaaattcgcgaacttgttgcgggcagcagcagtgaacaacgcgtaaccgccctgctttccctgcgtgaagttttcggtgatgatctgccagataacccgcattttgtgcaggccatcgaacaagcctggcaacaaatcgtacaattcggcgcacatcaggcgctattaaacaccctcaaaatttaacgatttctgcggttaaagcggatgaagctcaccttcgtccgctctccccttctcttttctgccttttttagccaggattaacgctcagttaacttaccagagtattgcggagccgttgtgaccaggaccaacctcatcaccggttttctcggcagcgggaaaaccacgagcattcttcatctgttagcccataaagatcccaacgaaaaatgggcggtactggttaatgaatttggggaagtcggaattgatggtgctttgctcgccgatagcggcgcattgctgaaagagatccccggcggctgcatgtgctgcgttaatggtttacccatgcaggtagggttgaataccttactgcgtcagggaaaaccagaccgcttgttgatagagccgaccgggctgggccatccgaaacagatcctcgatctgttaaccgcaccagtctatgaaccgtggatagatctgcgcgccaccttgtgcattctcgatccgcgcttgctgctggacgaaaaaagcgccagcaatgaaaacttccgtgaccagctggctgccgcagacatcattgtcgccaataaatccgaccgtacgacgcccgaaagtgagcaagcgctacagcgttggtggcagcaaaatggtggcgatcgacaattaattcacagtgagcatgggaaagttgacggtcatcttctggatttgccgcgtcgcaatttagccgagttgcccgccagcgccgcgcattctcatcagcatgtcgtgaaaaaagggttagcagcgttaagcctgccagagcatcaacgctggcgtcgcagtctgaacagcgggcaaggatatcaggcctgcggctggatattcgacgctgatacggtattcgacaccattggcattctggaatgggcgcgacttgcaccggtggaacgcgtcaaaggcgtgctgcgtattcccgaagggctggtgcgaatcaaccgtcagggcgatgacctgcacattgaaacgcaaaacgttgcgccaccggacagccgtattgagctgatttccagcagcgaagctgactggaatgccttgcagagcgcgctgttgaagcttcgtttagcgactaccgcgtaaggttgcctgcgtttttcagtaagataattagagaaaatatgattaaaaatttgccgcaaatagtgttgttgaatattgtcggcctcgcgctgtttctttcctggtatatccccgttaatcatggattctggttgccgattgatgcggatattttttatttctttaatcagaaactggtcgaaagtaaggcctttttgtggctggttgcattgaccaacaatcgcgccttcgacggttgtagtctgctggcgatgggtatgttgatgctgagtttctggctgaaagaaaacgcccctggcagacgacgtatcgtgattattggtctggtcatgctattaactgcagtggtattaaaccagctgggtcaggcattaattcctgtaaaacgggccagcccaacattgacttttaccgatattaaccgcgtcagcgaactgctctctgttcccacgaaagatgccagtcgagatagctttcccggcgatcacggcatgatgctgcttatttttagcgcattcatgtggcgttatttcggcaaagttgcaggccttatcgcccttattatttttgtggtttttgcatttcccagagtaatgattggcgcacactggtttactgacatcattgtcggtagcatgaccgtgatattgatcggtttgccctgggtgttgctgacgccattaagtgatcgattaatcaccttttttgacaaaagtctaccaggaaaaaacaaacatttccaaaacaaataactcacagtaattaacatcatcagggttatttttatagtgaggataatcctgatgatgcgcaccgtgctttcatctatcgaacgcaaaaatcattctctaagtaaatgaatggattgcatgcgtttcactcaattgtactttaattgaccaaccccgcttattaactttctgtatcactttttcttataaaaaatcatgtaaaaccgctcgccaagaccgcaccaatcgggtaatctcgaactcgttttgcctcggcggtagattatcctcacagcatataattttgtgcgttagtccacagatttggccttaaggaattgtttcaacatgcccaggtaattagtctcgtgtcgcttggcatttttttataacgatatttgtcgttaaggacttcaagggaaaacaaacaacatggtcaaatctcaaccgattttgagatatatcttgcgcgggattcccgcgattgcagtagcggttctgctttctgcatgtagtgcaaataacaccgcaaagaatatgcatcctgagacacgtgcagtgggtagtgaaacaagtagtctgcaagcttctcaggatgaatttgaaaacctggttcgtaatgtcgacgtaaaaagccgaattatggatcagtatgctgactggaaaggcgtacgttatcgtctgggcggcagcactaaaaaaggtatcgattgttctggtttcgtacagcgtacattccgtgagcaatttggcttagaacttccgcgtagcacttacgaacagcaggaaatgggtaaatctgtttcccgcagtaatttgcgtacgggtgatttagttctgttccgtgccggtagtacgggacgccatgtcggtatttatatcggcaacaatcagtttgtccatgcttccaccagcagtggtgttattatttccagcatgaatgaaccgtactggaagaagcgttacaacgaagcacgccgggttctcagccgcagctaataaaccgtttggatgcaatcccttggctatcctgacgagttaactgaaagcactgcttaggcagtgcttttttgttttcattcatcagagaaaatgatgtttccgcgtcttgatccaggctatagtccggtcattgttatcttttaaatgttgtcgtaatttcaggaaattaacggaatcatgttcatacgcgctcccaattttggacgtaagctcctgcttacctgcattgttgcaggcgtaatgattgcgatactggtgagttgccttcagtttttagtggcctggcataagcacgaagtcaaatacgacacactgattaccgacgtacaaaagtatctcgatacctattttgccgacctgaaatccactactgaccggctccagccgctgaccttagatacctgccagcaagctaaccccgaactgaccgcccgcgcagcgtttagcatgaatgtccgaacgtttgtgctggtgaaagataaaaaaacattctgtagttctgcgaccggtgagatggacattccactcaatgaattgattccggcgctcgacattaataaaaacgtcgatatggcgatcttacccggcacgccgatggtgccgaacaaacccgcaatcgtcatctggtatcgcaaccctttgctgaaaaatagcggcgtctttgccgctctgaatctcaacctgacgcctagtctcttttatagtagtcggcaggaagattacgatggcgtcgccctcattattggcaatactgcgctatctaccttttctagtcgtttgatgaacgttaacgaattaaccgacatgccagtccgtgaaactaaaattgcgggcattcctctgaccgttcggctttatgcagatgactggacatggaacgatgtgtggtacgcatttttactgggcggcatgagtggaactgtcgttggcctgctctgctattacctgatgagcgtacgtatgcgccccggcagagaaatcatgaccgccatcaagcgcgaacaattttacgtggcgtatcaaccggtggtggatacacaagctttgcgagtaacgggcctggaagtactgctacgctggcggcatcctgtcgcgggagaaattcccccggatgccttcattaactttgccgaaagccaaaagatgattgtgccgctgactcagcacctgtttgagttaattgcccgcgatgccgcagaattagaaaaagtgctgccggtaggcgtcaaatttggtattaacattgcgccggaccatctgcacagcgaaagctttaaagcagatatccagaaactgctcacttccctgcccgcacaccatttccagattgtgctggaaattaccgagcgcgatatgttgaaagagcaagaagccacacaactcttcgcctggctgcacagcgtcggcgtagaaattgctattgatgacttcggcaccgggcacagcgcgcttatctatcttgagcgttttacgctcgattatctgaaaattgaccgtggatttatcaacgccatcggtacggaaacgatcacttcccccgtacttgacgcggtgctgacgctggcgaaacgcctcaatatgctgacggttgctgaaggggtcgaaacgccggaacaggcgcgatggctaagcgaacgcggcgttaatttcatgcaaggctactggattagccgcccgttaccgctggacgattttgttcgctggctaaagaaaccgtatacgccgcagtggtaaggtgtgcttacgtcccttattattcatagtgaaagcatgccggattgcggctaatgatgagtaaaaggaaatccgttgcagatgattgtgcgcatactgctgctgtttatcgctctgttcacctttggtgtgcaggcgcaggctatcaaggaaagctatgcctttgccgtgctgggcgaaccccggtacgcgtttaatttcaaccattttgattatgtgaaccccgccgcgccaaaaggtgggcagataacgttgagtgccctcggcaccttcgataatttcaaccgctatgcactgcgcggcaacccgggcgcacgcaccgagcagctgtacgacacgctatttacgacttccgatgacgaaccaggcagttattacccgctgattgctgaaagcgcacgctatgctgacgattattcctgggtggaggtcgctattaatccgcgcgcccgttttcatgatggtagccccattactgcccgcgatgtagagtttacttttcaaaaatttatgaccgaaggcgtgccgcaatttcgtctggtctacaaaggcaccaccgtcaaagccattgcaccgttaaccgtgcgcattgagttagctaaacccggcaaagaagatatgctgagtctgtttagcctgccggtatttccagaaaagtactggaaggatcacaaacttagcgacccgctcgccacgcctccgcttgccagtggtccgtaccgcgttacgtcctggaaaatggggcaaaatattgtctattcccgtgtgaaagattactgggcagcaaacttaccggtaaaccgtggacgctggaatttcgacaccattcgctacgattattacctcgatgataatgtcgcctttgaagcgtttaaagcaggtgcctttgatttgcgtatggaaaacgacgccaaaaactgggccacgcgttataccggtaaaaatttcgataaaaaatacatcatcaaagatgagcaaaagaacgaaagtgcccaggatacgcgttggctggcgtttaatatccaacgtccggtattcagcgatcgccgggtccgggaagctatcactctcgcctttgactttgaatggatgaacaaggcgttgttttacaatgcctggagtcgcacgaacagttattttcagaataccgaatacgcggccagaaattaccccgacgccgcggagctggtgcttctggcaccaatgaaaaaagatctaccgagtgaagtcttcacacaaatctaccagccgccggtatccaaaggcgatggctacgatcgtgacaacctgttaaaagccgacaaacttctcaacgaagcgggctgggtgctgaagggtcagcaacgcgttaatgccacaacgggtcagccactcagctttgaattattgcttcccgcaagcagcaatagtcagtgggtattgccgttccagcacagcctgcaacggctgggtatcaacatggacattcgcaaggtggataacagccaaatcactaaccgcatgcgcagtcgcgactatgacatgatgccgcgcgtatggcgggcgatgccgtggcccagttccgatttacagatttcctggagtagcgaatatatcaattccacttataatgcccccggcgtgcaaagcccggttatcgacagcctgatcaaccaaattattgccgcgcagggaaataaagaaaaattactgccgttggggcgagcactggatcgcgtattaacgtggaattattacatgctgccaatgtggtacatggcggaagaccgtctcgcctggtgggataaattctcccagccggccgtgcgccccatctatagcctcggtatcgatacctggtggtatgacgtcaataaagcggccaaactgccgtccgccagcaaacagggagagtaaatgggcgcttacctgattcgccgtctgttgctggtgatcccaacattatgggcgattatcaccatcaactttttcatcgtgcaaattgcgcctggcggtccggtcgaccaggccatcgccgccattgagtttggtaatgccggagtattacccggcgcaggcggtgaaggtgttcgtgccagccatgcgcaaacgggtgtcggcaatatcagcgacagtaattaccgtggcggacgcggattagatccagaagtgatcgctgagatcactcatcgctacggttttgataagccgatccacgaacgttacttcaaaatgctctgggactacatccgctttgattttggcgatagcctgtttcgcagcgccagcgtgctgacgctgattaaagacagtctgccggtttccatcaccctcggattgtggagcacgctgattatctatctggtgagcattccgttaggcattcgcaaagctgtttataatgggagccgctttgacgtctggagtagcgcatttatcatcatcggctacgccattccggcctttttgtttgccatcctgctgattgtcttcttcgcgggcggcagctatttcgacctgttccctctacgcggcctggtttccgctaactttgatagcctgccgtggtatcagaaaatcaccgattatctgtggcatatcacgctgccggtgctggcgacagtgattggtggctttgcggcgctgaccatgctgacaaaaaacagtttccttgatgaagtgcgcaagcaatacgtggtgaccgcgcgtgcgaaaggggtaagtgaaaaaaatattctctggaaacatgtgttccgcaacgccatgctgctggtgattgccggttttccggcgacgtttatcagcatgttttttaccggcagcctgctgattgaggtgatgtttagtctcaatggtctgggcttactgggctacgaagcgaccgtcagccgcgattatcctgtaatgtttggtaccttgtatattttcaccctgattggcctgctgctgaatattgtcagtgatatcagctatacgctggttgatccgcgtattgattttgagggacgttaatgagccgactcagccccgtcaatcaggcccgttgggcgcgttttcgtcataaccgtcgcggctactggagcttatggattttcctcgtcttgtttggtttgagtttgtgttctgaacttatcgccaacgataaaccgttgctggtgcgttatgacggcagttggtatttcccgttattgaaaaactacagcgaaagcgattttggcggcccgctggcaagtcaggctgattatcaggacccgtggctgaaacaacggctggaaaataacggctgggtactgtgggcaccgattcgctttggtgctaccagtatcaactttgctaccaataagcccttcccttctccaccctcccggcaaaactggctgggaacggatgccaacggcggcgatgtgctggcacgcattctctatggcacgcggatcagcgttctgtttggcctgatgctgactctctgttccagcgtgatgggcgtgctggcgggggcgctacaaggctattacggcggtaaagtcgatctctggggacaacgctttattgaagtatggagcgggatgccgacgctgtttttgattattttactttccagcgtcgtacagcctaacttctggtggctgctggcaattactgtcttgtttggctggatgagtctggtcggcgtggtgcgggcggagtttttacgtactcgtaatttcgactacattcgtgcggcacaggcgcttggcgtcagcgatcgcagtatcatcctgcgtcatatgttgcctaatgccatggtcgcgaccctcacctttttaccgtttattttatgtagtagcataaccaccctgaccagcctcgatttcctcggcttcggtctaccgctcggtagtccgagtctcggtgaactgctgttacaagggaaaaataaccttcaggccccgtggcttgggatcaccgccttcttgagcgtggcgatattattgtctttgctgatctttattggtgaagccgtccgcgacgcatttgatcctaataaggcggtgtaacatgacgcaaactctgttagcgattgaaaatttgagcgtgggttttcgccatcagcaaaccgtacgtacagtagtcaatgatgttagtctacagattgaggctggcgaaacgctggcgctggtgggtgagagtggtagtggcaaaagcgttaccgcgctgagtattttacgcctgctcccttccccgccggttgaatatctctccggcgatattcgttttcatggcgaaagcctgcttcacgccagcgatcaaacgttgcgcggtgtacgcggtaataagatcgccatgatttttcaggaaccgatggtgagcttaaatccattgcataccctggaaaaacagctttatgaagtgcttagtctccaccgcgggatgcgtcgggaagcggctcgtggcgaaattcttaactgccttgatcgcgttggtatccgccaggcggcaaaacggctgacagattatccgcatcagctctccggcggcgaacggcagcgggtgatgattgcgatggcgctgttaacgcgaccggaattattaattgccgatgaaccgaccaccgcactggacgtctctgtccaggcgcagattttacagctgttgcgcgaactgcaaggcgagctgaatatgggcatgctgtttattactcataacctcagcattgtcagaaaactggcccaccgcgtggcggtaatgcaaaacggtcgctgtgtcgagcaaaattacgccgctacgctatttgcaagtcccactcatccttacacacaaaagctactcaacagtgaaccgagtggcgatccagtgccgttgccagaacctgccagtacgttgctggatgttgaacagcttcaggttgccttccccattcgcaaagggattttgaagcgcattgtggatcataatgtggtggtgaaaaacatcagttttacgctacgagcgggtgaaacactgggtttagtgggcgagtccggttccgggaaaagtacgacgggactggcgctgctgcgactgattaattctcagggcagcatcatctttgacggtcagccactgcaaaatttaaatcgccgccagctgttacctattcgtcatcgcattcaggtggtatttcaggatccaaactccagcctcaacccacgactcaacgttttgcagattattgaggaaggcttacgggttcaccagccgacgctttctgccgcacaacgcgaacaacaagtgatagccgtgatgcatgaagtgggattagatcctgaaacacgccaccgttatccggcggagttctctggtggtcagcgacaacgtattgcgattgccagggcattaattcttaagcccagcctgatcatacttgatgaaccgacaagtagtctcgacaaaacggtacaggcgcaaatattgacgctattgaaaagtttgcaacaaaagcatcaactggcctatttgtttatcagccacgatttgcacgttgtccgcgcgttatgtcatcaggttatcatactgcgacaaggggaagtagtggaacaaggaccgtgcgcgcgcgtgtttgccacaccgcagcaggagtatacgcgtcagctactggcgttgagctgacgcttaaaaaggattgtagttactaaagggttcggcaattgccacaccaaaatttttcaatcggcatgttgcagcaaactcgtcctggcgatttacaaacaggcacggctcaccttcacactccagcacgctacatggaacttcgatgtcgcttaacgcctggcttagtttatacatcacgctccatgcattatcaccatccgggctaagcaatttaagcgccaccaggctgttgtcaccgcacggtccattttgcggaatcggttcaaccttgctacctgcgaaaccagcagaccagcgatagttctgcggcagtcgatggacgatactgagttgtaaactagtcacttattttccccggaagcacattcacttcacaatttgtttacatcaattttaacacatcatcaacaatccgtctttatacagatcgtaaagattgatgcctcgcctgcgtggcctctatggctctgatttaagtaatatctgcgggcgtggtcacgtttgcggggctatatgtacccgtttctgcgatctaactcaacctttttaactacaatgatgtgactttttacataaattgattttacataaaataaacatatatcgggggaatgatagatttgtggttgacatgcatcaacaaaggaagccttttagcttcctcgttgtgcaatagatcaccgttttttcggccgactggcgtacagacagaagagaatggagctggttgcgcagaatgcaatactccaaatcatcggccatgcagagttaaaggtcgcaagagaaagcaatgcgccaacaattgcccctatgccaaaacggaaggttcctgccaggctagatgccgttcccgccatatggggaaactcatcaagaatgaccgccatcgcattggaactcaccatgctcacgcagcccacaaacgccgcaacgccaaccaccaggctccaaaatcccagccccagcagcgcactgatgaccatccacgctgccataataaattgtatccacaacccgctgcggaacatatttaacgcgccaatgcggcggacgaagcggctgttaaagatggtcatcacgaacagaaaaacaatgtttagcgcaaagtaataaccaaagttttccggcgcgacgtggttaatttcaatataaacaaacggtccggcgcttaagaaactgaacatcccggcaaagctgaaaccactggcaagcatgtagctcaggacacgtttatggcggaacagcgccgcaaagttaccaatagtggtacgaatgtgaaatggctgacgacgctccggtggtaaggtttctttaatcaggaagaaaatcattgcgctagccagaatcgccgctaatgccaggatccagaagatgtaatgccagctcagccacaccagcacccagccgccaactatcggtgccatcagcggtgcaatggttgtcaccagcatgacaaagctcatcatccggctgaactcttctttcgggtaaatatcgcgcatcagggcgttaatgaccacgctggccgcagccgcagccagcccgtggaagaaacgcatcacaatcagctgatcgatggtgtttgccaacgcacacgccaccgcggcggcggcaaacaccagcgtaccgccgagcaccaccggcttacgcccgaagctgtctgccatcggcccgtagattaactgccccaacgcaaagcccagaatataagtactgagggtcatctgcgtactgcccgccggtacgccaaactgcgcactaattaccggtagcgcgggcagatacatatcaatgctcagcggcatcaacatggccagcaggccaaggataaaaacaatagcaaagctgctatgctgtcgggtggtcacaacgggctcctgaaagtcattgaaaagttagacgacgctggcaatttcttcttcagttaacggacgatattcaccgggggctaaatcagcatccagcgtaataccgccaatacgttcacgatgcagctcaaccacgtggttacccacggcggcgaacatgcgtttcacctgatgataacgcccttcgctgatggtcagacgaacctgcgttggggtaatcacttccagcaccgcaggcttagtgagatctttttcgttatgcagctgcacgcctttagcaaattgctctgccgtatcgtcagctacaggactttccagtgtcaccagataggtcttctcgcaatgatggcgcggagaagtaatgcggtggctccactgaccatcatcagtcatcagcaccagaccggtggtatcaatatccaaccgccccgccgcatgcagtttccacgctaccggttcatcaagaaaatagagcaccgttgggtgatcagggtcgtccgtggagcaaacatagccctgaggcttattgagcatgaagtaacgtggaccgtgttgctgcgccagcgggttgccatcgtaagcgacatcatgttcaggaagcagtttgaacgctgcattacggacgatttcgccatcgacggtgacacgattgccgcggatttcacgcccggcaatagcacggctaacgccgagttgctgtgcgataaatttatcaagtcgcatgtgtgtgattttgcctgtaaaaacggaggtcgggcattgacccgaaaatctgaactgttgtctgcccagtatagcggtctaataacatccctcaagggaaaaagatccatggcatactattagcagaataatctacctacgcgagaccatgatttttacacttcgcccatatcagcaagaagccgtggatgccacgctcaaccattttcgtcgtcataaaacccctgccgttatcgtgctgcccaccggcgcaggtaaaagcctggtgatagcggaactggcacggctggctcgtggtcgcgtgctggtgctggcacacgttaaagaactggtggcgcaaaaccatgcaaagtatcaggcgctggggctggaagccgatatttttgccgccgggctaaagcgcaaagagagccacggtaaagtggtatttggcagcgtgcagtctgtcgcccgtaatcttgatgcctttcagggtgaatttagcctgttgattgtcgatgaatgtcaccgtattggtgacgatgaagagagccagtatcagcaaatcctcactcacctgacaaaagtgaatccccacttacgcctgctggggctgactgccacgccttttcgattgggcaaaggctggatctaccagtttcattatcacggcatggtacgcggcgatgagaaagcccttttccgtgactgcatttatgagctgccgctgcgttatatgattaaacacggctatctgacgccgccagaacgactggatatgccagtagtgcaatacgatttcagccgcttgcaggcacagagtaacgggctgttcagcgaagccgatctcaaccgtgagctgaaaaaacaacaacgtattaccccgcacatcatcagccagattatggagtttgctgcaacgcgcaaaggggtgatgatttttgccgcgacggttgaacacgcaaaagagattgtgggattactgcctgccgaagatgcagcactgattactggcgacacccccggcgctgagcgcgatgtgttaattgaaaattttaaagcccagcgttttcgctatctggtcaacgtcgcggtactgaccaccggatttgacgccccgcacgtcgatcttatcgccattctgcgccctaccgaaagtgtgagtctttaccaacaaattgtcgggcgcggtctgcgtctcgctccgggcaagactgattgcttaattcttgattatgcgggtaatcctcacgatctctacgcgccggaagttggtacaccaaaaggcaaaagtgacaacgttccggtacaggttttctgccctgcctgcggttttgccaacaccttttgggggaaaacgaccgccgacgggacattgattgaacactttggtcgtcgctgtcagggatggtttgaagatgacgacggtcatcgcgaacaatgtgacttccgtttccgttttaaaaattgcccgcaatgtaacgcggaaaacgatattgccgcccgccgctgccgcgaatgtgacaccgtactggttgatccggacgatatgttaaaagcggcgctacgactgaaagacgcgctggtattacgctgtagcggcatgtctttgcaacatgggcacgacgagaaaggcgaatggttgaaaatcacctattacgatgaagacggcgcggatgtgagtgagcgtttccgtctgcaaacacctgcccagcgtaccgccttcgagcagctttttatccgcccgcatacgcgcacaccgggcatcccgctgcgctggatcaccgccgccgatatcctcgcccagcaagccttattgcgacacccggattttgtcgtcgcccgcatgaaaggccagtactggcaggtgcgtgaaaaagtgttcgattacgaaggtcgttttcgtctggcgcacgaattacgcggttaatggtagttttgattgatgtataaggcgattgagtatagaatctcgcccgcttttgcatacgcaaagcagatcacttacctgttgctgggtcgcctgtagcaggattaatttaagagagaaagaaatgtttactatcaacgcagaagtacgtaaagagcagggtaagggtgcgagccgccgcctgcgtgccgctaacaagttcccggcaatcatctacggtggcaaagaagcgccgctggctatcgagctggatcacgacaaagtcatgaacatgcaagctaaagctgaattctacagcgaagttctgaccatcgttgttgacggtaaagaaatcaaagttaaagctcaggacgtacagcgtcacccgtacaaaccgaagctgcagcacatcgacttcgttcgcgcttaattgctgaataagttgtaaaaaaccccgctccggcggggttttttgtatctgcagattatgcctgattacggtattgctattttttgcaggccagataaggcgttcacgccgcatctggcattcagaacacaaaaccgattaattgccgccagacgtccggcgctgcaattggtcgcgcaaattcggcggcgtgcctttaatggtcaaggtatcggttgctggatcccagaagatgcgttcacctaacagcatcgcatcaaagttaatagtcaagccaccgccgctaccggcaaacttcgtcaactgacgcagtgtgctacggtctgccgggaagctctcttccagttcgtagcctttttcagccgcaaactccgtgaagctcacttcgcttacgcctgccagctctttgctcaggcttttcagttcgatctcttcgcctgcctgcagctgctcattacagtagctataaacctgctggcgcacgttctgtcgctctgctttatccagttgtgcttcggcagtgaaatcatcaaccgcttgcaacagcccacggttttgcgctttcgcgtttaacccttcgctggccccgaggaaatccataaagaaatccgccactttgcgccctactcgccctttcaggaaagtgagatagcgggtggactctggattggtttcccattcggttaaatcgatacgcgcaacaatatccgcatgattgatatcaagataatgggttgggttgatgtcgagattttcgttaacgcgcatactgctcaggttgctcagaactgccaccagcaaatactccaccgccagatagcgatagtggcaaaacagcacgaatccaccgtcagcaaaaggatatttcgctaattcgtcacgcaggcggccggttgccgcgcggctaaatgccaggaagtcctcttcgccctgacgctgtaagcgcagcgtctgcgccagttcactctcttcgctaaacaagccgtaagctttatttttggcgctatagacccgatgcagttctgccaccatctcaacgacggtttctgtcggttccagcaaactatcgcgcaacaccagctcaaggttctgctcatcacgcttgataagctggtgcagagcaatctggttgatatccagactcatgataaactctcctttaagaccgggcggtattcaaccaccgccggttaagcgacgcaataaaagatggcggtcattttacagaaggcagcgtaacgagaatgatttaacgcataaaaaagcagaaaaaaaaccgttgctacggtaatatgttgccctttcatcaactaactgatttcgatttatgccacaaatttcccgctacagtgatgaacaggttgaacaattgctcgcagagctgctcaacgtactggaaaaacataaggctccgaccgacctttccctgatggtgttaggcaacatggtcactaaccttatcaacaccagcattgccccggcccaacgccaggcaattgccaactcttttgcccgcgccttacagtcctctatcaacgaagacaaagcgcactaagggaaacagataacaggttatggtaactcatcgtcagcgctaccgtgaaaaagtctcccagatggtcagttgggggcactggtttgcactgttcaatattctgcttagcctcgtcattggcagccgttacctgtttatcgccgactggccgacaacgcttgctggtcgcatttattcctacgtaagcattatcggccatttcagcttcctggtgttcgccacctacttgctgatcctcttcccgctgacctttatcgtcggctcccagaggctgatgaggtttttgtccgtcattctggcaacggcgggaatgacgctattactgatcgatagcgaagtctttactcgtttccatctccatcttaatcccatcgtctggcaactggttatcaacccagacgaaaatgagatggcgcgcgactggcagctgatgttcatcagcgtgccggttattttattgcttgaactggtgtttgcgacgtggagctggcaaaagctgcgcagcctgacgcgtcgtcgacgcttcgcgcgcccgctggccgcattcttatttatcgcctttatcgccagccatgtggtgtatatctgggccgatgccaacttctatcgcccgatcaccatgcagcgcgctaacctgccgcttagctacccgatgacggcgcgacgttttcttgagaagcatggtctgcttgatgcgcaggagtatcaacgccgtcttattgagcaaggtaatccagacgccgtttccgttcagtatccgttaagcgaactgcgctatcgcgatatgggcaccgggcagaatgtgctgttgattactgtcgatggcctgaactacagtcgcttcgagaagcagatgcctgcgctggcaggttttgctgagcaaaatattagcttcacgcgccatatgagctccggcaacactacagacaacggcatctttggcctgttctatggcatcagcccgagctatatggacggcattctgagcacccgtacgcctgcggcattaattactgcgcttaatcagcaaggctatcagctggggttattcagtagtgatggctttaccagcccgctgtatcgccaggcattgttgagtgatttcagcatgccgagcgtacgcacccaatccgacgagcagaccgccacgcagtggatcaactggctgggacgctacgcacaagaagataaccgctggttcagctgggtttctttcaatggtactaacattgacgacagcaatcagcaggcatttgcacggaaatatagccgggcggcaggcaatgtcgatgaccagatcaaccgcgtgctcaatgcactgcgtgattctggcaaactggacaatacggtggtgattatcactgccggtcggggtattccactgagcgaagaggaagaaacctttgactggtcccacggtcatctgcaggtgccattagtgattcactggccaggcacgccggcgcagcgtattaatgctctgactgatcataccgatctgatgacgacgctgatgcaacgcctgctacatgtcagcacacctgccagcgaatatagccaaggtcaggatttgttcaaccctcaacgccgtcattactgggttaccgcagcggataacgatacgctggcaattaccaccccgaaaaagacgctggtactgaacaataacggtaaataccgcacttacaacttacgtggtgaaagagtgaaagatgaaaaaccacagttaagtttgttattgcaagtgctgacagacgagaagcgttttatcgctaactgattaattataaatcagttagcgaaatatcttacttgcaatcggtgtggaaaacggtagtattagcagccacgagtcggcacgtagcgcagcctggtagcgcaccgtcatggggtgtcgggggtcggaggttcaaatcctctcgtgccgaccaaaaatcccaagaaaaaaccaacccttacggttggtttttttatatctgcaattaattcgataaacagaccgtgacacatcacagcctgtttattttctgttatcagaacgtcctgagctttcatcctatgaaattaattgctgttaaaagcattgggtacagaaaatacccatagctccatacccggagtcagtttttaaaaactgtttaaagaaatgcacaagtattgtgattgattttttagttgtttttcttgatgagaagctgatgcaaaattccgtctttataatgaaaatgatgccaaagcgaacgacaaggttgtagttttcactacatgtccatacataaaatggggtaacattcacgcgcctggtagcgttaccaacgctacgctcaaacataatgattctaataaaacctcaggagactactatgcctgaagcaacaccttttcaggtgatgattgtggatgatcatccacttatgcgacgcggtgttcgtcagttactggagcttgatcctggctctgaagtggtcgccgaagcgggcgacggcgcgagcgctatcgatctggcgaatagactggatatcgacgtgatcttgctggatctcaatatgaaaggtatgagtggcctggatactctcaatgccttgcgcagggatggcgttaccgcgcaaattattatcctgaccgtatccgatgcctccagcgatgtctttgcgctgatagacgcaggcgcagacggttatctgttgaaagacagcgacccggaagtattgctggaagcgattcgtgccggagcgaaaggcagcaaagtctttagcgaacgcgtcaatcagtacttacgtgaacgtgaaatgtttggcgcggaagaagatcccttcagcgtgctgacggagcgcgagctggatgttctgcacgagctggcacaggggctgagtaataaacagattgccagcgtgttgaatatttccgagcagacagtaaaagtacatattcgcaatctgctgcgtaaactcaatgtccgcagtcgcgtggcggccaccattctgttcctgcaacaacgcggggcacaataaaaatagcccgatggatttatcatcgggctgagatttatgacaaacgcaaaactgcctgatgcgctacgcttatcaggcctacgtggatcgatcaatttattgaatttacacaattttgtaggccggataaggcgttcacgccgcatccggcataaactaagcgcactttgtcaacagtctagcccgatggcatcaccatcgggcctctttttatttactctcctgcgggctcaaatgttgcatcgcctgcgcgatactacgttcaatcaccgcacggcgagtatcgttggcaggtaagagtttcaacatcatctcccacgcggcaacggcttcgccaaatcgctgctgctcaaaggcattaaacgcatacatgcttagcacacggatattgctatggtccgttctcaccagctgacgtagcagttcaccgccgaggcggttgtcgttgggatcagaactacgagtcaacgcttcagcgtatcccagtgcagcatcactgtttttcggatcgaggcgatacgcagtggcgtatgcatcggtggcgatactggcgttacccagcgccatgccaacgcggcccaacataatccagccttctatatctcccggatttttttgcagttgagtacgcatccccagcgcaagacggctcatctcttcttcgttgagcggatcggctttcggatccagcgccctgtccagcaacgccggagcctgtgccgtggcctgctgccagattttcacctgctgataattgccagtctggtagtagctgacgccagccacaattaacgccaccacaatacccggcagataaacaacatatccggcacgcttaccttccggcacgctttgttcaggaaacgcttccggcaccacgcgtacccgacgccggctgcgggcgtatatgacccaaccgccaatgccaatagccactactggcagcacccacagcagcacggtcagcggcgttaacggcggatcgtaagtgacgaagttgccgtaacgcgccaccatataatcgacaatctcttttttacttttaccttcctgcatcagttcatacactttctgacgcaggtcggtggcaatcatgctgttggaatcggcaatgctgttgttctggcatttcgggcagcgcagttcttcagtgagctgacggaactgttgttcctgtgcttcatctttaaactgcaacacatcgatggtcgccagcgcactgccggagatcatcagcatcagcacgcccaataaaaacctcattgtgcggcctccttactgtatttctcccacagcggcttgatctcttcttcccagacgcgaggattcagatcgcccgcatggcgatagcgaatgatgccgttgccgtcaataagaaacgtttctggcgcgccatagacaccgagatccagccctaacatgccatcgccatcaaacaggcttagcgcgtaaggattgcccagctctttcagccagctgattgccttctggcgatcgtctttatagttcatgccgaccacgcggatgccctgcgcagaaagctgattcagatattgatgttccgcacggcaggtcggacaccaggtcgcccagacgttaagcagtactggtttgccctgagtcagcacatccgcctgataaaactgccccggattgtccagactttcgagacgaaacttcggcacaggcttgccaatgagcgcgctttccagattggtcggatcatccccttcggcattacgcgccagctgccacagcagcgccgcggcaatcgccaggaagataatcaacggaattaacaatactttgcgcttcatacggcctccggcgcagttttttgcggactcacgcgcttacgatagcgaggatcaaacagacacagcagtccgcccaacgccatcatcagcccgcccgcccaaatccagcgaacaaatggtttgtagtaaagacgcacggcccacgcgccgttttccagctcttcaccgagggccgcgtacaggtcacgcgtgatgccgccgtcaattgccgcttcggtcatcatgctcccggcagtgttgtaataacgtttttccgcatacagcaccgtttccggcttgccatcgcgcgttacgccgatagtcgccacaccgccacgccagttcgggccagtcacctctttgacatcacggaaggtgaagcgatattcatgaatatcgacgctatcgccggacttcatgcgcacatcacgctcaacgctatagttctggctaaaggcaatgccaacaattgtcactgccagcccaaggtgagccgccaccatcccccaataactgaaggtggttttcgtgccgcgactaatacgtagcgcagcttccgcaattgccagcaccgcaatccagcaggccattgccaggccgagcaccgtcatcgccacaactttgctttcgaacagccacggcaacagcaggctcagcaccagcgtagagatgaaggcgataatcaataaattgcggatcttacgcgggcgatcccgcccccagcgcaccagaggaccgacaccaagcagtagcgcaaacggcaccatcagccaggtaaacatggtgttgaagaacggttcgccaatgctaatactgcccagtcccagttgcttatgcaccaacggcagcagcgtccccagcaacaccaccagcatcgcagcgaccagcaaaacattgttcgctaacagcaaagattcccggctccacagcgcattgtttacgcgactgcgaactttgtgtccacgcgcggcaaacagcagcaggctaccgccaatcaccagcaccataaaggcgaggataaacataccgcgcgccggatcagacgcaaacgcgtgtacgcttaccagcacgccggaacgcacgaggaaagtccccaacagacacaagctgaaggcactgattgccagcagtaatgtccacgctttgaagctggcgcgttgttcagtgaccgccagactgtgcatcagcgcagtccccaccagccacggcataaagctggcgttttctaccggatcccagaaccaccagccaccccagccgagttcgtaataggcccatgcggaaccgagcacgatgccgagcgtcaggaagatccacgctgccagcgtccacggacgagtaaaacgcgcataagtgctgtccagacgcccgctcagcaaagaagcaatggcaaaagcaaacgccacgctgaaacccacgtaccccatataaagcagaggcggatggaagatcagccccggatcctgcaatagcgggttaagatcgcgaccttcaatcgggaagttcggcaacgtgcgagagaacgggttagaggtaaagagaatgaacagcaaaaagccgacactgaccatccccattatcgccagtacacgggccacaatatccagcggaatacgctgactaaaaatcgccaccgcaaaggtccagccgctcatcagcagcacccacagcagtaggctgccttcatgcgcgccccaggtagccgccacgcgataccacaccggaagctgggtattggagttgctggcaacataggtgacggtgaagtcgttgaccacgaaagcattgaccagcaccagaaatgcgccagccacagacataaacagcagccaggcaaacaagcgggaagacgccatcatgcgcgcatctccgcgcgccacgccccatagcggatacacggacagcagcagcgcaattcccagcgccaggcacagcagtccgttaccaatttctggcatcatgatgctgggtccttataaacttacgtcaacttgctgggtccttataaacactcgccgggcgacggtggttagcttccatcgctttctcaacttctggcggcgtatagttttcatcgtgtttcgccagcacttctttcgcgaggatatgattgcctttttccagttcgccctgcaccacaacgccctgcccttcacggaacagatccggcaaaatgccttcgtaagagacatccacactgccttcagcatcgtaaatggtgaaggtcactttcaggctattgggatcgcgctgcacactacccggcatcaccatcccgccaacgcgcagacgctgaccgacttccggcatttgctgagtttcacgcttgccgtagagaatttcccccggcgtataaaagagatcgatattgctgcgcagcgcatatagcaccagaccgatagtcagcgccagccctgccaacacggcacaggcaatccacaagcggtttttacggcgaatattcatgcagcctcctgctgttgcgcagcacgtaaacgcgcctcacgcgcccgctgttgcgccacgccacgcagaattgcgcgatgttgcatcacgctgtgcacgaccaaaaccaccagcggaataacggtcatcaccaccgccagccagacaaaaaaggcgtaaccgcccattgcgaaaaattcattccaggaagcaaatgcaggggtcatttacggcctcttttcagtatcagttcactcacccacggacggcgtttttccatcagcaaaatcaaattacgcatccgcatcagcgtcagcgtggcagacaggagcaggaagccaaaaatgctccagcgcagcgggctacgcatcgccggatcgatactttgctgcatccgcgtacttccctgatgcagggtgttccaccactccacggagtaatgaataatcggcagattcaccacgccaatcagcaccaggatacctgccgcacggcccgccagacggcggtcgtcgaaggcgtgccacagggcaatcacacccacatacaaaaacagcagcaccagttcagaagtcagacgtgcatcccatacccaccaggtgccccacatcggttttccccatgcagagccggtaaccagggcaataaaggtaaacacggcaccaatgggggccatcgccgccaccgccaggttggccattttcatctgccagacaaggccaataaacgctgccactgccatacttgcataaatgcccatgctccagatcgccgcaggcacatgcaggtagataatgcggtagctatttccctgctgataatcagccggagcaaagccgaatccccagatccagccgacggtaagcacgaccacactggcaattgccagccacggtataaaccagccacagatttgatacagccgtggtgggatcgccagttgatgcagtgttttccacatagtttcgataccagactcgaacaaaaatcagtaatccagcgttattgaatgctgattcgtaacgctgccgccgtcgcaaaaggacttaatgtcgcggtgcctgccagcaacgcgcctaaaattgccagatacccgtcaacgggcaaatgcatagaagccgcgtccatcgcggcggtggcaaagatgagtaatgggatagtcagcggtaacaccagtatgctgagcagcacaccaccgcgcttaagtcccactgtcagcgccacgcccggtgcaccgagaaagccaagcgtaggcgttcccagcagcagcgtcagcgccatcacttgccagccataaacatccattcccagtagcattgctaccagtgggctaaggatgagtaacggcagaccggttaccatccagtgcgccatcaccttcgccagcacaacggcgggcaagggtaacggcaacaacatcaattgttcaagactgccgtcctgcaaatcgtcacggaacagtcgttccagcgccagcaaggaactaagcagcgcagcaacccagataatgcccggtgcaatacgcgccagcagttgcggctccggaccgatactgagcggaaaaagggtaattacaatcaggaagaaccacagcgggttggcgatttcggcgctatggcgaaacgctacacgcagctcaagacggaaaatgcgccagaacatcatgcggccctcgtttgcgtcagactaatgcggcgaattttactttcagcaacgttgagcggctggtgggtagtcagaatcacaatccccccctgctccgtatgctgcgccatacgctgggtcagacgatcgacaccgttaacgtcaatcgcggtaaaaggctcgtcgaggatccataacgtggcacgggtcagccacagacgcgctaaagcgacgcggcgttgttgcccggcgctgagctgatttacaggaatatcttcgaatccggcaagcccggcctgcgccagggcttccagacattgtgcggtatcgccatcgcgatgataaaagtgcagattttctaacgccgtcagccgggttttgatccccggctgatggcctatccataacaggttttgatggtagctgtcgcgtacctgatgcaagggctgcccttgccagagaacctcgcctgcgtcagggcgagacaaccccgtcagcaaacggagaagcgttgtcttccccgcgccgttgctaccggtgatttgtacccactctcctgcgttcagcgtaaaactcaagccactaaataaggttcgttcatcccgctcacaaagtaactctctggcttcaagcatacccacgcaataaccctgttaaaaacctggctcgacttcacgcatatcgggcagcttgtgcgctatccctttatggcaatcaatacaggtttgcccatctttcaccgcctggtcatgcatcttcgcggcaacgcttttctgggcggttgtatccatatactcgaagttgtgacagttacggcactcctggctgttattgtccttcatgcgccgccactcattctgtgccatcgtcagacgatgagcttcaaatttctgcggcgtgtcaataacgccaaaaattttaccatacagctctttacttgctttgagcttgcgtatcatcttcggcacaaactcgtgcggaacgtgacaatccggacaggtcgcacggacgccgctacggttgttgtagtgcacggaatccatgtattcctgatacaccgtgttgcgcatttcgtggcagctaatgcagaactcttcggtattggctttttccatcccggtgttaaagccaccccagaagacgatgccgccaacaaaaccgatcaacagcagcgtccccagcgccagacggctgggggtacgccaccatttccacaggcgcttaatcagaccaggcttacggtcagaatttcccataataacctcttatttcccgtaacctttacttggggtaaaggtattccccacgattggcgcggtatcggcctgcggtacgtgacattgcagacagaaataacgacgcggagccacttccgcgcccactttgccgtcgctgtccataaagtgagtaggactgatacgcggcgcgccagtggtgcgatagctttcgacaccgtggcactgcaagcagcgattggtattggtcgttacctgataaccttcaacgctatgcgggatcattggcggctgattcacatagttcagcggcatccgatcctgctcttttggcatccgaatggccccttcctgtgtcccggatacttccgggctctggctaaaatcgacgccattagccgcccaaaccgcgccgcttaccaccagggccagcatcgccgtccattgacacagcgctttcttcaggtcatggcttttcatgatttcgctcccgaactccattatgtcaacttttcgctccgctactccatcgtgtagttattgtaaatacatcctcagaacagacatccacgcagcgaccgcacgtcatgcaatcgcggctggtgacctgcaccgggctttgttcatccagcaccggggcacgtagcacatgcggttccgggcaaacatgaaaacaatccatacagcggttacatttctgccgatcggtggccgcaacggtaatcacacctttgctacccagcacgccatacagcgcgccaaccggacaaatgtgcccgcaccagccgtgttcaacgaccagtagatcaaataaaaacagcgcgagaataagcagcgcgccgctgccgaagcccattaccaggctacgccccatcagagaaacggggttgatccattcccaaatgagcgtgccagttaaggcacttcccaccagaatgaccaccaacagcacgtagcgaatgtggcgagggatcgtcgcagactgattgaggtcaaagcgcctgcgtaaccagttcgctaagtcggtaatcgggttcagcgggcagacccagctgcaaaataatcgctttcccgccagggcgtagagcacggtgataatcaccgcaccggtcaacgccaccgtggcaggcagatgaccactggcaagactttgcagcgtcatcagcggatcggtcagcggaacggtgtcgaataacaggctactgctgtagttgccgtgcaagatccacacaccaaaccatggaccgctcaaaaacatccccagcacgaagaactgacaaaggcgacgtaacaccagccaacggtgactgcgccaccagccttttttctccagcgcctcgcgcccggcgtcacgtttacgatttgccattgttcccctccagccagccgttacttagcttttgccattgttcccctccagccagccgaagcggtaatggtgacctaactcccctttcgccagactcagcggtaacaccttgattgccggttgttccagcacgcatactttttcgcacttaccgcaaccggtacaggcgtcgctgtgaaccgtcggcagaaagcgggcgtgcttaccggtacgcgtgttgcgctccagctccagggtgatggcctcatcaattttcgggcattcgcgataacaaacatcgcagcgcagcccctgaaagttgagacagttttcctggtccaccagtaccgccagccccatccgcgcgtcgtcgatgctttcaatctcacgatccagcgcaccgcttgggcacactttggcgcacggaatgtcctcacacatttcgcaaggaatatcccgtgcgacaaaatatggcgtgcccgcgctcagaccagaggccagcgtcgccagttttaaggtgtcgtaagggcaagcctgaacacactgaccgcaacgcacacaggcactggcaaaggcgttctcgtttatggctccgggcgggcgcaaccgcacgccagatgcgcgtgcggtttgctgttgtaaccccagcgccacacccacggcagccagcccgcctgctgtgcgaacgacatcgcgcagaaagcggcggcgaccattttgaggtttcgcactccgggacataatggcttacaccttctccagtttgaccgcgcacttcttgaagtccgtctctttgctgagcggatcggtcgcatccagcgtcagtttgttaaccaactgtgcggcgtcgaagaacggcatgtacaccaggccctgtggcggacggttacgaccgcgcgtttcaacaatgctgatcacttcgccacggcgagaaaccactttcactttgtcgccacggcgcagatcgcgcgctttcgcatccagcgggtgaataaacaggaccgcttccgggaaggcgcggtgcagttctggtacacggcgagtcatactgccggtgtgccagtgctccagaacgcgtccggtagagagccacaggtcgtactcttcatccggtgcttccgccgccggttcgaatggcagtgcgaagatcaccgctttgccatccggtttaccgtagaacttatagccttcgcccgctttcacgtacgggtcgttaccttcgctgtaacgccactgcgtttctttaccgttcaccaccggccagcgcagaccgcgcgctttgtggtagtcatcgaacggtgccagatcgtgaccgtgaccgcgaccaaaccatgcgtactcttcgaacagccctttttgcagatagaagcccagctcgcgggattcatcgttcagctgatcttccgccagttcggataccgggaatttgctcacttccggtgtggcatacagcacttcgtacagcgttttgccacgcagttccggtttcttcgccagcagatcttccggccatacttcttcagttttgaagcggcgggagaactggactaactgccagagatcgcttttcgcttcgcccggtgcctgtacctgttgacgccagaactgagtacggcgttcggcgttaccgtaagcgccctctttctctacccacattgcggtcggcaggatcaagtcggcggccagcgcactgactgtcggatacggatcggagacgatgatgaagttgcgcggatcgcgccagcccggcatacgctcttcattgatgttcggcccggcctgcatgttgttggtacacatggtccagtaaacattcagtttgccgtctttcagcgcacggtcttgtgccaccgcgtgcagaccgattttcgccggaatggtgccgctcgggatattccacttcttctcgcagatatcacggtgtttctcgttggtcaccaccatgtccgcaggcagacggtgagcaaaggtgcccacttcacgcgcagtaccacacgcagaaggttgcccggtcagggagaacggaccgcaacccggctgggaaattttgccggtcagcaggtgcaggttgtagaccaggttgttagcccacacgccacgagtatgctggttgaagcccatcgtccagtaggagatgactttcttgttcggatcggcatacagctgcgccagttgttctaactggtctttcggcacgccggtcatttcggcagttttttccagcgtatactcggcaacgaaggctttgtaatcttcaaagctcatcggttcggaggcgtcagaacccggattcttcgctgctttttccagcggatgggtcggacgtaaaccgtagccgatgtccgtcgcccctttgcgcaggttaacgtgcttgctgaagaagtcctgatttatcgcattgttttgaatgatatagttggcgatgtagttcaggatcaccaggtcagattgcggcgtaaagatgatgccgttatccgccagctcgaagctacgatgctggtaggtagaaagcaccgccacggtgacgttctggttagagagacgacggttagtgatgcggctccagaggatcgggtgcatttccgccatgtttgcgccccacagcacaaacgcgtcagcctgctcgatgtcgtcatagcagcccatcggctcatccataccaaaggtacgcataaagccaactactgcgctcgccatacagtgacgcgcgttcgggtcgatgttgttgctacggaagcccgctttaaacagcttggacgcggcataaccttcccagatagtccactgaccagaaccgaacataccgatgctttccggccctttttctttcagggcggttttgaatttctcttccatcacatcgaaggcctgatcccaggtgattggggtaaattcgccttctttgtcatatttaccgtttttcatacgcagcagcggctgcgtcaaacggtctttaccgtacatgattttgggcaggaaatagcccttaatgcagttcaggccacggttaaccggtgcgtccgggtcgccctgacaggccaccacacgtccctgctgcgttccgaccagaacgccgcaaccagtaccgcagaaacggcacggcgctttatcccatttgatggcttcctgctgaccaacaacggcgcgggcaacgcccggcacgctgagaccggcagccgccgcagcggccgcaacggcgttagctttcataaagctacgacgactgagtttcatggtgtttcctcaccttgctcttcctgctggtgataaaccaggctcaccgccagcacgccctctacgttgcgtacactctcaatggtttggatcagcgtttcgctgtcttctgcttccaccaccacaatcaactgaccgctcggcgcgtcgctgacagcaacttcacagccgggaaaggcgttcagttgggtgctgatgtcactaattcgttcgcttttggcctgcacgaccaggctgcaaacttgccagttagtgtgcatggagatactccgcagttatggcacttaccggacagctggctgcacatgctccacatccgttgcaaagttggctattaagttgcggctggtagatcccggagagcgtcgggcgaaagataattgccattggctcacagctatcctgacagcggcggcattcaacactctgatacgccaggcacgcgtccccgatggtgaactgcaaatcccaggccctggtgtggcgcggagaaaataggctttcggggcaagcctgcgcgcaggcgtaacagaagctgcactcgttatttttgaaattaacgctcggatagccgcccgcgccgcgttgcagaatgttgttttcacaagcattaatacaggcgtcgcagcgggtgcaatgggtcagaaaatgagattcatcaccggaccagggcggacggataccgttactggctttgcgccagcgaccagtgagtatgccccgacgggatgcatcaatcttcacattgaccttccatcattaacgcgctctgaaaattgagagcgaccaaataaaccgcataattaataagccatttttatagccgctaagatattaaaggatgtgtcaaagatgcataccccgatcggggtaaaacctgtagcaggatcaaaagagtggcgggaagcgtggcaaaaacgggcttttgctcacatttcaaatggttataaatatatttatatagcgattgattcaccagagatatttctgctggtttgctctctcattagaatttaacactaaaagagcaggtaaaattgtctgaatgttctttaagttattcataaagcaaattaataaatctgatgaatatgttaaccttcagcgacatcatcggtgaaaacctataaatgaagaaggaaagcaaaaaaatgaagaccattctacctgcagtattgtttgccgctttcgctaccacttccgcctgggcggcagaaagcgtccagccactggaaaaaatcgcgccttatccacaagctgaaaaagggatgaagcgtcaggtgattcagttaaccccgcaagaagatgaatctaccctgaaagtagaactgttaatcggtcagacgctggaagtcgattgcaatttgcatcgtctcggcgggaagctggaaaacaaaacgctggaaggctggggctatgattattatgtctttgataaagtcagttccccggttagtacgatgatggcctgcccggatggcaagaaagagaagaaatttgtcaccgcgtatctgggcgatgctggaatgctgcgttacaacagcaagctgccgatcgtggtgtatacgccagacaatgtagatgtgaagtaccgcgtctggaaggcggaagagaaaattgacaacgcggtagttcgctaaactgccgtgaagtgcggcaccccgtaggtcagacaaggcggtcacgccgcatccgacatccaacgcccgagccggttgcctgatgcgacgctggcgcgtcttatcaggcctacaccgctgtgaagtgcggcaccccgtaggtcagacaaggcggtcacgccgcatccgacatccaacgcccgagccggttgcctgatgcgacgctggcgcgtcttatcaggcctacaccgctgtgaagtgctccaccccgtaggtcggataaggcggttacgccgcatccgacatctaacgcccaagccggttgcctgatgcgacgctggcgcgtcttatcaggcctacaccgctgtgaagtgctccaccccgtaggttggataaggcggttacgccgcatccgacatccaacgtccgagccggttgcctgatgcgacgctggcgcgtcttatcaggcctacaccgctgtgaagtgctccaccccgtaggtcggataaggcggttacgccgcatccgacatctaacgcccaagccggttgcctgatgcgacgctggcgcgtcttatcaggcctacaccgctgtgaagtgctccaccccgtaggttggataaggcggttacgccgcatccaacatctaacgcccgagccggttgcctgatgcgacgctggcgcgtcttatcagcatacgccacatccggcataccatgccggatgtggcgtatcattacaacgcaatatccgccacttctttttgaacgggttgcggtttcaactgcggtttcggcgtactatctgctgcctgcggcttgtcgtagttcaaccccagcacttcgctggtgtactgcaactcgcgttctgttgccgctacatcaccgttcagcttgcgtccataagacggaacgatcgctttcaacgtagcctgccattgcgggctggaaacacgatcgccaaatactttttccagcagattcaacataatcggcgcggcggtactcgcccctgggcttgcccccaggagcgcggcaatggttccttgctggtcactgacgacttcagtacccagacgcagtacgccacctttctcggcatcacgcttgataatctgcacgcgctgccccgcttgccacaaacgccagtcctcttttttcgcctgcggatagtactctttcaacgcttcaaaacgatcctcttcactcaacatcacctgactcaccagatatttcaccagatcgaaattatccagcccgacgtgcatcatcggcatcacgttagaggtggtggtggaactcattagatcccacaaactaccgtttttgaggaatttggtactgaaggtggcaaatggcccaaacagcactacgcgtttaccgtccagaacgcgggtatcgatatgcggaacgctcatcggtggtgcgccaacggatgctttaccgtaaaccttcgccagatggtgattaaccacgtccgggttttcgctaacaaggaactgtccgcccaccgggaaaccggcgtagtctttcgcttccggaatcccgctttcctgtaacagcttcagcgccgcaccgcccgcgccgataaagacaaatttggcacgaatgttctgtgcagtgccatttttcagatcggcaacggtaacggtccaggtgttatcgtcattacgctttagggcgcggacttcgctgctgagttgcaggctgaagttagatttcttctgcaaggaagcaattaactggcgggtgatctcgccgtagttcacatcggtaccaatttccgtacgcgtggctgccactttctgttgcggatcgcgcccttccatcactaacggtgcccactctttgatctgcgcgtgatcttcagagtaacgcataccgcgaaacaggctgctttgttgcaacgcggcgtaacgggcgcgcaggaaattgacgttatcctcgccccagacaaagctcatatgcggaacggtattgataaaactacgcggagtacgcagcacgccgcgctcaacctggtgcgcccagaactggcgggaaatctgaaatgcttcgttaatggcgactgctttttcaatactgatgctgccatcggcgttttgcggggtgtagttcagttccatcagtgcagaatgcccggttccggcgttattccagccgttgctactctcctgcgcgacaccctccaggcgctccaccatggtcatgctccattcaggctccagctcgcgtaaataggtccccaacgtggcgctcataatgccgccgccaatcaacagtacatcagtttcctgctcctcggacgctttcgcttttgccgccatgctaacggcattaagccccacggccatgctgaagagcatggcagtcacttttttcatcttgttaatgccttacttttagtcgctttattgcaggtgagatttgcgcggcatcaacggtaacacttaagtaacaacatttaaataatgtttataaattatattctaattttagaaacattataatttcgttgattaattatagggttattagaaatgaagggatttttagcatattgacctgacggcagcagtccgccaggtcagcgtcgtaatattatgccgtccgggcaacggcatcacggctagcggcatcgcgctcttcgcccgtcagctcgctaagttgcccattgcgcatttccagcaggcggtcggcgtggataaagtaatgatcatcatgactgatagcgaaaatagttttacccatctcctgcatcagcggcagcaacacctgataaaactcacgacggaagtgtggatcctgatccgccgcccattcatccagcaggataatatcgcgttcttctgccagcgccagcaacagcgccacgcgttttttctgccctttacttaacttcaggttaacaatacgcccgttgcttaactcaagcttatgagccattttcagctgcgccagccacttctcaaccagttgcgggttagcgggtttaccctccggccccagcagttgatcaaacagccagacatcggtaaacactgcgctaaacagtttgcgataatcttccggttgttcgccgctgacaggtttgccatccagcaagatttcgccgctttgtggctgatacaagcccgtcaacaacatcgccagcgtgctttttccgctaccgttgccgccaatcagaaacagcagctcgccacgtttgatggtgagattaatcggaccaacggaaaacgcgttatcctgataagcaaacgtcacgttacgcagctccagcgtttgccagttgggaaacgcctgcgggcgcggaaactctgctttgaaaggcgcgagcgcgaatttgttcagcttgttaaacgccacctgcgccgtcagcagcgtcggcaatgcgccaaccgcgctaagcagcggcgtacgcaggaataaaagcgtcaagctataggtcgcggcaacgttggtatcagcccaaccgaggctgttcgccatccagaacaccaggccgattgcgcccagcatcatgatgttactccagttcacggcactaagatggaaggtgtctgcgcgaataatatggtggcgatactcttgcgcatcaggaatgtagaggttgttaaacacatactcggcgcgttcccggttcagagtcagctctttgcgcccttcaagtacagtttgaaaatccgtgtacagcttgtcttcggtttcacgcagggtcgccatatgtttgtacacccgcgccaccagcacaaaaccgccccagatggtgatcgccatccagatagccgttaccagcaacattttgccgctcagcatccacagatacgccgcactaccgatagtgagaatgatcccctgcaccagttccggcagacgcacaaaagcaatggtgatattgcgcacatcgctggttaaccccgccagcaagctggcgctaccgagttgttcaatgcgctcgacgtgagtatccagaatccgcttgataaattcactacgcagtcggtaaacgaagtgatgccccaaagtggtgagcgccagttggcttccgagagtgactgccatcaacagcagcaataatcccagaaactccggcaacaccagcagactggtatccgccgtttcgataaggcgctgattgataaaagcaattaagccaatgcctaatgccgcactggcgaggcttagcgccatcacactgataaatggccagcgatactgccgccagacaagtacaagaagttccatgcagaaaacccggacaatgaattacagcccgcagtttaaacatcttcgcgcgcacagcaataataattcttatttttattcttttttacctgcctgacggaatgtcaggttgtagcggcagtcgatggtgagtggatgaaaccccgctttcaacggttgaataccgtgataaaacagccggctttcaccgccccataccaccacatcgccatgttccaacaacaaacgtttgagcggatcatttcgtttcaggccgccaaattgaaaaatcgcgggtaagcccagagaaacagaaacaattggcgcgcgcagatccggttcgtctttatcctgatgcaggctcagtttcgcgccaggagcgtagcggttgataagacaagcatctggctggaaatctggatagcccgccgccgtagccgcacgttgacataaattatgaaaactctgtggcatggcgggccacggtttatttgtttgcggatcaatggggctatagagataaccttgccgatgggtcgtccagcccagatgcccacagttggtcatcgccacgctcatggtatatcccccgggggtgaccatctggcgaaacgggctctggctggcaacgtcattaatatcgcggatcagttgctccgcagcgttaaaagcaaaacgccgtaaaattaccgcaccagccgccagtggctcttgccacggttcagcatcggcaaacagatccaacattacctctcctcattttcagcttcgcggcgcagcagttgcgctttacggctcacgccccagcggtaaccggaaagtgtgccatcaccacggaccacccgatgacagggtattatgatagccagcttgttggcggcacaggcgctggcaacggcccgtaccgctttcggtttgccgatggcgttagccagttgctgataactgacggtttcaccgcaaggtatcgtgcgcagtgcctgccagacttgttgctgaaaagcagtgccgcgaatgtccagcggtaacgtcagcggcgtatcgcgttgattgaggctggcgatcacttcacgcacatgttgctgaaacatcagatcggcaggcgcgttgtcggcagcgggaaacatctgctgcaactcgctgattagtgtcgcgtcatcatcgcccagcaatatcgcgcaaatcccccgctcgctttctgccaccaggcaacgacccagctcacaatcagccagcgcgtaacgcaccgccagattttcgccaccgtgacggaattgtttagccgtcatgcccagcgtttcgtcagctttgcgatagtaactgctgctgtcggggaatccggcgttaagaatagacgtcgtcacgctctcccctttcgccaggctttcgcgcaaacggcgagcgcgccaggcctgttgccaggctttaggcgtcattccggtagtcgctttaaacaaccgatgtagatgaaatggactcatcgccacctggtcggctaaggcttccagcgttacaggcgtttcctgttccagcagtcgacacgcgtgggtgattttatccaaccgatgttgctgggcattggctttttctggctgacaacgtttgcaggggcgaaagccagcggcgagtgcctcgctggcatttgcgtagaaggagacgttttcccgcaaagcatgtctggcgcggcaagacggacggcaaaagatgcctgtggtacgcacggcgaaaacgaattcgccgtcggcattcgggtcgcgggctaagacagattgccagcgttgatcgtcagttaagcatgtggcttttttcataatcagctccctggttaaggatagcctttaggctgcccggtcaccatcacgcaaaaaccaacaatcttgcgctttaatttttttcgctgacaaggaagcttttaaactgtggactcatccaggttttaaagctatcgccttctttggtgatcatataaaccgccagcccttcccggcgaacaacctctttagctttctccggcccgagtaccatcaagccagtatcccaggcatcggcttccagcgccgtcggagcaatcaccgtcacggataccagattgtgttcgatgggacgcccggtttgcggatcgataacatgggaaagacgtttgccgtccagttcgtaatagttacggtagctgccagaggtgctaatcccatgaccgttgatatccaccacagcctgaaccgcgttttctttatcggttggtttttgaatcgctacccgccacggcaggccttcaccgttcataccacggctgttcagcgcgccgcccacgctcaccagatagcgggaaatcccttcctgctccatcaagcgtgccaaatgatcggccgcatagccttcgccgacggtggagagatcgacatataaatccggcaggtctttttgcagatattgctgatggctctgattgatgaccgtcaggtgctgtaagccggttttggctttcatcgcatcgatctgttcctggctcggaatttgaaccggctgttgttccgggccaaagccccacagattcaccagcggcccgacggttatatccatcgcgccatcggtcttcgcgccaatgcgcaggctggtggtgacgatatcggccatcgcttcacttaccggccacgggcttaaactttggctgtcgttaaagcgcatcagcgcggaatcttttttataggtgctaagcagctgatcgtcggcgtccagttgggtctgaatcttttctttaagttcggcgctgcgtttggcgtcaatgcccgggatgctggcacgccagaaggtacccatagttttgccttcaagaacggtaacttcagtagcgtgggttttggcgggttgtggtttttgatcgcaaccaacaaagaagagcgcggcagccagcagtgccacgcgggtaaagcttatttccatacgtgattatcctcatgcgaacggtcgcaagagtacaccaaaaaactgagtttgtacgctgaaaacaatgaaaaaagggcccgcaggccctttgttcgatatcaatcgagattagaactggtaaaccagacccagagctacgatgttatcagtgttgatgccagcgtcacgagtgaactggttgtcgtccagcaggttgattttgtagtcaacgtaggtggacatgtttttgttgaagtagtaggtagcaccaacatcaacatatttcaggatatcttcgtcgtcgtagccacgacccaggtttttacctttagactgcaggtaagccagggacggacgcagaccgaagtcgaactggtactgagcaacagcttcgaagttctgtgctttgttcgcccaacccagggaacctacgcgagttgcgttgtaggtctgggtgtactgagcagccaggtagatgttgttagcgtcgtatttcagaccaccagtgtaggtttcagcacggtcgccgttaccgatgtaagcagcggtgttctgagcatcagtacgtttggagctggagatcgcaccaccgataccgaaaccttcgtaatcataagtgatagaaccgccgacgccgtcgccgttttgacgcagtgcgtcacgaccgttgttagttacgccactagtaaagccttcaccagatgggttgccgtttttaccctggtactgaacagcaaagttcaggccgtcaaccagaccgaagaagtcagtgttacggtaggtcgcgaagccgttaccacgctgctgcatgaagttgtcagaaccgtaggtgtcaccaccgaattctggcagtacgtcggtccaggaagttacgtcataaacaacgccgtagttacgaccgtagtcgaaagaacccacatcctggaatttcagacctgcgaatgccacacgggtccaggagttgttttcgttttcagcgctgttgccctggatctgatattcccactggccgtaaccggtcagctggtcagtaacctgagtttcacctttgaagccaagacgcatgtaggtctggtcgccatctacatctttgttgtcagagaaatagtgcaggccgtctactttaccgtacagatctaatttgttgccgtctttgttgtaaacttcagcagcgtttgctgcgcctgctaccagcagagctgggaccaggagggacagtactttaactttcatgttattaaccctctgttatatgcctttatttgcttttttatgccactgcatactgattaaccctcattaatcagtcggcaagtccattctccccaaaaatgcagaataatccaacacgaatatgatactaaaacttttaagatgtttcatttatcgctatagatgtttcaaaatgtaaatgcaagggaactttttaagattattgcggaatggcgaaataagcacctaacatcaagcaataataattcaaggttaaaatcaataacttattcttaagtatttgacagcactgaatgtcaaaacaaaaccttcactcgcaactagaataactcccgctatcatcattaactttatttattaccgtcattcatttctgaatgtctgtttacccctatttcaaccggatgcctcgcattcggttttttttacccttctttacacacttttcattattctgtgctaccacagaaaaactataacgcttgttaactatttcacaaataattaacatccgcataatttccagcaatctttgtttatttgcaattatttttgttgggctttttgtaggttatttgtacagcaaaatggcgcttgtacatctatttcccccaatgcaggatgataaatatcacgggagaatagagaatcatcaatcaggtaagagtctggaatttcacactgtaccctttatactgccctatcacttcgcgaagttttaacaggtcataaacacgaatgcgtcagaaagagacaacggccacgacccgctttagtctcctaccggggagcattacccgcttctttttactgttgatcattgtgttactggtgacgatgggtgtaatggtacaaagcgccgttaacgcctggctgaaagataaaagttaccagattgtcgacattacccatgctatccaaaagcgcgtcgataactggcgttacgtgacctggcagatctacgacaacattgccgcgacgacctccccctcctccggcgaaggtttacaagagacgcgcctgaaacaggatgtctactatctggagaaaccacgccgcaaaacggaagcgttaatctttggctctcacgacaacagtacgcttgagatgactcagcggatgtccacttatctggatacattgtggggcgcagaaaatgtaccgtggagcatgtattacctgaatggtcaggataacagtctggtgctgatcagtaccctaccccttaaagatctcacctccggatttaaagaaagcaccgtcagcgacattgttgatagtcgtcgtgcagagatgttgcaacaggccaacgccctcgatgaacgcgaaagcttttctaacatgcgccgcctggcctggcagaacggtcattactttacattgcgtactacctttaaccagccaggacatctggcaacggtcgtggcttttgatctgccgattaatgatttgatcccaccgggtatgccgctggacagtttccgccttgagccagacgcgacggcaacgggaaacaatgataatgagaaagaagggacggatagcgtcagtatccactttaacagtacgaagattgaaatctccagcgcactcaactctaccgatatgcgcctggtctggcaggttccttatggcaccttattgctggatacgttgcaaaacattctgctgccactgctgctgaacatcggtttgctggcgctggcgttatttggctataccacattccgccatttctccagccgcagtacagaaaacgtccccagcacggcggtcaataacgaattgcgcattttacgggcaatcaatgaagagatagtcagtctgctgccgctcggcctgctggttcacgatcaggaaagcaaccgcactgtcataagtaacaaaattgccgatcatttgctgccgcatttgaatctgcaaaacatcaccaccatggcggaacagcatcaggggattattcaggcgacgatcaataacgagctgtatgagatccgcatgttccgcagccaggtcgcgccgcgcacacaaattttcattattcgcgatcaggatcgcgaagtgctggtaaacaagaaactcaagcaggcgcagcgtctgtatgagaaaaaccagcaggggcggatgatctttatgaaaaacattggcgatgcgctgaaagaacccgcacagtccctggcggagagcgcggctaaactcaacgccccggaaagcaaacaactggcgaatcaggcagatgtgctggtgcggctggttgatgaaatacagttagcgaacatgcttgcggatgatagctggaaaagtgagacggtgctgttctccgtgcaggatttaattgatgaagttgtgcctagtgtgttgcctgccatcaagcgtaaaggtctgcaactgctgattaacaatcatctgaaagcacacgatatgcgccgcggcgatcgcgatgccttacgacgtattttgctgctactgatgcaatatgccgtgaccagtacgcaattgggaaaaatcacccttgaggttgatcaggatgagtcctccgaagaccgcctgacgttccgcattctggacacgggagaaggcgtaagtattcatgaaatggataatttgcacttcccgtttatcaaccagacccaaaacgatcgctatggcaaggcggacccgctggcattctggctgagcgatcaactggcacgtaaactgggcggtcatttaaacatcaaaacgcgggatgggcttggtacacgctactctgtgcatatcaaaatgctcgcagctgacccggaagttgaagaggaagaagagcgtttactggatgatgtctgcgtaatggtggatgttactagcgcagaaattcggaatattgtcactcgccagttagaaaattggggtgcaacctgtatcacacccgatgaaagattaattagtcaagattatgatatctttttaacggataatccgtctaatcttactgcctctggcttgcttttaagcgatgatgagtctggcgtacgggaaattgggcctggtcaattgtgcgtcaacttcaatatgagcaacgctatgcaggaagcggtcttacaattaattgaagtgcaactggcgcaggaagaggtgacagaaagccctctgggcggagatgaaaatgcgcaactccatgccagcggctattatgcgctctttgtagacacagtaccggatgatgttaagaggctgtatactgaagcagcaaccagtgactttgctgcgttagcccaaacggctcatcgtcttaaaggcgtatttgccatgctaaatctggtacccggcaagcagttatgtgaaacgctggaacatctgattcgtgagaaggatgttccaggaatagaaaaatacatcagcgacattgacagttatgtcaagagcttgctgtaacaaggtagcctattacatgaacaatatgaacgtaattattgccgatgaccatccgatagtcttgttcggtattcgcaaaagtcttgagcaaattgagtgggtgaatgttgtcggcgaatttgaagactctacagcactgatcaacaacctgccgaaactggatgcgcatgtgttgattaccgatctctccatgcctggcgataagtacggcgatggcattaccttaatcaagtacatcaagcgccatttcccaagcctgagcatcattgttctgactatgaacaacaacccggcgattcttagtgcggtattggatctggatatcgaagggatcgtgctgaaacaaggtgcaccgaccgatctgccgaaagctctcgccgcgctgcagaaagggaagaaatttaccccggaaagcgtttctcgcctgttggaaaaaatcagtgctggtggttacggtgacaagcgtctcagcccaaaagagagtgaagttctgcgcctgtttgcggaaggcttcctggtgaccgagatcgctaaaaagctgaaccgcagtattaaaaccatcagtagccagaagaaatctgcgatgatgaagctgggtgtcgagaacgatatcgccctgctgaattatctctctagtgtgaccttaagtccggcagataaagactaatcacctgtaggccagataagacgcgttagtgtcttatctggcatttgcaccgattgccggatgcggcgtaaacgccttatccggcctacgattcccattatttcaacaaattacattaaagtaggccagataagacgcgtcagcgtcgcatctggcatttgcactgaatgccggatgcggcgtaaacgccttatccgtcttagctatcccggcttttcctgaccctctcggcatataacgtcagcgtctgttttatcacatccagcgttaccggcttgctcaggcagctgtccataccggactccagacaccgctgcttctcttcagccaacgcattagcagttactccgattaccggcaacgtcagtcccaactgacgaatgcgttgcgtcaagcggtaaccatccatatttggcatgttgacgtcgctaagcacgatatcaatatgattcttgctaagtacattaagcgcatcgacgccatcattcgcggttttacattgatagcccaagcttcccaactgatctgccagcaaacgccggttaatcggatgatcatccacgaccagaatcatcatatcgtcattatcgctgaccgctttgtccgtactcggcagagcgttagcaggatcgtcgctctccatctcgatcaaataaatacgcgccaacaatgccggtagctcatgcggagcagccacactgtgtacccactcccctggcgctttctccagcggaataccaatatggcgacgacagaaggtcactaccgctctgccctgccattttttactcactacctcgtcagtgatcaacacatcttcgggagtcggttcctgcccttcgtatgttgtaacgacgatgccgctgcgctgcaaactggtttccaggaactgacagaggctcgcattgcggaccgccagccagcagcgtttaccactcaacccttccacgccttttttctgcgggtactgagcgccgtacaacggaatacgcacggtaaactggctgcccattcccggttcactatctacgctgatatcgccgtccatcatgctgatcagtttttcacaaatcgccagacccagaccggtcccctggaaattacgctgtacgcccgttccgacctggaagaagggatcaaacaagcgcaccacttctttcgccggtatccccacgccggtatcgcgaacacggatagagagataatcgccatccgcgcgaacatgcaaaactatacagccggtatcggtgaattttatggcgttactcaacaggttggagatgacctgctgtaaacgcatcgggtcgccatttaaggccactggcacatccggttcaataaagcagtacaagcctaactgcttgcgtaccaccagcggtaaatagttggcggtgatgtggttcatcacttcacgcggactaaactcacgcggttcgatcttcaactgttcgctttcaatcttgctgaaatcgagaatatcgctgataattttcaacaacaggctggaagagttgttcattgccgtcaccagccgatcgacgcctttcggtaactctttggtttgcaacagatccaggttaccgataatgccatacagcggcgttcgcagctcatgactgacggtggcaaggaacatgcttttactctggctcgcctgttccgctgcttgtgccatctcctgcaagctctcttccatcttcacgcggctagaaacatccaccagcacacaaatggccacgttttcattacgatagcggctatggacgaagctgatttgcagattggtattgttgctggtcaggacatcaacaaaattgacctgctgcccacagataatttgcgtcagtcgttggcggtcctcatgcgtaagcatattgagataggtatgcgccagttcgttacttaaaatattgacgccatcagcggtacgcaaaatgcagatacccactggcgcggaggcgacaatcttgcgattgaactgctcatgttcttccagtcgcagggcgtcgctttccgccggaatgaaaatacgtcgctcgtacatccgtgcgagagtaaacaatgcagctccggcaagcacattcagcaaaattgcgttaaggatcaacatgcgaatgcgttccagcaccttatcaaccggcacgctatacacgatgcttaggctactgggtggcagatttttcttcagcaccagctcccggaacccttccgtatagccaaaccaggagcgttcctgcatccagcgaggatcgcccttaattttactttctggtccggtaaggctaatcagggtatgaccattttcatcaagaatggtaacccccatcggcaacgtacccggtaagaaaaagttctccatccggatggtctgctcgacacccaaaagcgcctgcaaccggttcgccagataaactggcgtcaacgcgtaaaaatacccgacgccagggcgcggaccttcgctgatccagtagaggttactgccgctatcatcttgtggtgcatttcgatatttattgatgcgttcatgcaaagctttcaacgcggtatcgcgttccactggcatatcacgcagaccgaaattggccatgcagaggttatcgctgccgattaaaaatacccggtttagatcgtaagccgcagaaaaattatcgcgccagtagcgcataaaccacgccaaactctccagagaacctcgccaggtgttactcattgcggaacaatcggagtcggcaaacagcggttcaaacgcaggcacatccgcctgcgtttctcgtccacgcggggaaagcacaccgttttctgcgcttaagcgattttcggcgatgtacttcagctctttcatcacatcagaggtgcgttgaataaagcgctgagcctgatcggaactcagattaaattcctgacgaatttcgctttctcgctgatgtaacgcattaacgatgtaaaaaacggaactaaaagcaatcaacagccagagcactaacgccaatgctctgaacatgtagcggctggctttcagggttgtacgaaaagaagcaaggtatttcaaaggggcgaagctccgcctcaggtgaccgatggagtgtggttaaggtagcggtaaaagcgtgttaccgcaatgttctctcttctctggaatatgatacaccgccgagaaatcatcaccttaacctctgataatcgtcatataccggacaagactagtggatttcagcatgcattatatgaagtggatttatccacgccgcttacgcaatcaaatgatcctgatggcaatcctgatggtcattgtcccaacgcttactattggttatatcgtagaaacggaaggacgtagtgcagtcttatctgaaaaagagaaaaaactttctgccgtggtcaacctgcttaatcaggcactaggcgatcgctatgatctctacatcgacttaccacgtgaggagcgtatccgcgcattaaatgcagaacttgcccccattaccgaaaatatcactcacgccttccctggcatcggtgctggttattacaacaaaatgctggatgcgataatcacctacgcgcctagtgcgctatatcagaataatgtcggcgttaccattgccgcagatcaccctggtcgcgaagtgatgcgtacaaatacccctttagtttatagtggcaggcaggtgcgcggcgatattttgaatagtatgctccccattgagcgtaatggtgaaatcctcggctatatctgggccaatgaattaaccgaagatattcgccgccaggcctggaaaatggatgtgaggattatcattgtgctcaccgctggtttgctgataagcctgctgttgattgtccttttctcccgtcgcctgagcgccaatattgatatcatcaccgatggcctcagcactctggcacaaaatattcccactcgattaccacaattgcccggtgaaatggggcaaatcagtcagagtgttaataacctcgcccaggcactgcgtgaaacgcggacacttaacgatctgattattgaaaacgctgccgatggcgtcattgccattgaccgccagggtgatgtaaccaccatgaacccagcagcagaagttatcactggctatcaacgccatgaactggtagggcagccttactccatgttgttcgacaatactcagttctacagtccagtactggatacgctggaacatggcaccgaacatgtggcgctggagatcagttttccaggtcgtgaccgcaccattgaactcagtgtcactaccagtcgtattcataacacgcacggtgaaatgataggtgctttggtgattttctctgatttaactgcccgcaaagaaacccagcgccgcatggcgcaagcagaacgcctcgccacactgggtgagctgatggctggcgtcgcgcatgaagtacgtaatccgttaacggctattcgtggttatgtacagatcttgcgccaacaaaccagtgacccaatacatcaggaatatctgtccgtagtactcaaagaaatcgatagtattaacaaagttattcagcaattgctcgaatttagtcgtccacgccacagtcaatggcaacaagtcagcctcaatgcattggttgaagaaactctggtactggtacaaaccgccggcgtacaagcgcgggtcgacttcataagcgaactggataatgaattaagcccgattaacgccgatcgtgaactgctcaaacaggtactactgaatatcctgatcaatgccgtccaggctatcagcgcacgagggaaaattcgcattcaaacctggcaatacagcgacagtcaacaggccattagcatagaggacaacggctgtggcattgatctcagcctgcaaaaaaagatcttcgatccctttttcaccaccaaagccagtggaaccgggcttggtctggcgttaagtcaacgcatcattaatgcccatcagggtgatattcgcgtcgccagtttgccgggctacggcgcaaccttcacgcttattttaccgatcaacccgcagggaaatcagactgtatgactgctattaatcgcatccttattgtggatgatgaagataatgttcgccgtatgctgagcaccgcttttgcactacaaggattcgaaacacattgtgcgaacaacggacgcacagcattacacctgtttgccgatattcaccctgatgtggtgttgatggatatccgcatgccagagatggacggcatcaaggcactaaaggagatgcgcagccatgagacccggacacccgttattctgatgacggcctatgcggaagtggaaaccgccgtcgaagcgctacgctgcggagccttcgactatgttattaaaccgtttgatctcgatgagttgaatttaatcgttcagcgcgctttacaactccagagtatgaaaaaagagatccgtcatctgcaccaggcactgagcaccagctggcaatgggggcacattctcaccaacagcccggcgatgatggacatctgcaaagacaccgccaaaattgccctttctcaggccagcgtcttgattagcggtgaaagcggcaccgggaaagagttgattgccagagcgattcactacaatagccggcgggcaaaggggccgttcattaaagtcaactgcgcggcgctgccggaaagcttgctcgaaagtgaactgtttggtcatgaaaaaggtgcatttactggtgcacaaaccttgcgtcagggattatttgaacgagccaacgaaggtactctgctcctcgacgaaattggcgaaatgccgctggtactacaagccaaattactacgcattctacaggaacgggaatttgaacggattggcggccatcagaccataaaagttgatatccgcatcattgctgccaccaaccgcgacttgcaggcaatggtaaaagaaggcaccttccgtgaagatctcttttatcgccttaacgttattcatttaatactgccgcctctgcgcgatcgccgggaagatatttccctgttagctaatcactttttgcaaaaattcagtagtgagaatcagcgcgatattatcgacatcgatccgatggcaatgagtctgcttaccgcctggagttggccgggaaatattcgagagctttccaacgttattgaacgcgccgtcgtgatgaatagtggcccgatcattttttctgaggatcttccgccacagattcgtcagccagtctgtaatgctggcgaggtaaaaacagcccctgtcggtgagcgtaatttaaaagaggaaattaaacgcgtcgaaaaacgcatcattatggaagtgctggaacaacaagaaggaaaccgaacccgcactgctttaatgctgggcatcagtcgccgtgcattgatgtataaactccaggaatacggtatcgatccggcggatgtataacaccaaaacttgctatgcagaaatttgcacagtgcgcaattttctgcatagccgctcattctccttataaatccccatccaatttatcccttcatattcaattagttaaataactaaatccaataatctcattctggcactccccttgctattgcctgactgtacccacaacggtgtatgcaagagggataaaaaatgaaaacaaaattgatgacattacaagacgccaccggcttctttcgtgacggcatgaccatcatggtgggcggatttatggggattggcactccatcccgcctggttgaagcattactggaatctggtgttcgcgacctgacattgatagccaatgataccgcgtttgttgataccggcatcggtccgctcatcgtcaatggtcgagtccgcaaagtgattgctagtcatatcggcaccaacccggaaacaggtcggcgcatgatatctggtgagatggacgtcgttctggtgccgcaaggtacgctaatcgagcaaattcgctgtggtggagctggacttggtggttttctcaccccaacgggtgtcggcaccgtcgtagaggaaggcaaacagacactgacactcgacggtaaaacctggctgctcgaacgcccactgcgcgccgacctggcgctaattcgcgctcatcgttgcgacacacttggcaacctgacctatcaacttagcgcccgcaactttaaccccctgatagcccttgcggctgatatcacgctggtagagccagatgaactggtcgaaaccggcgagctgcaacctgaccatattgtcacccctggtgccgttatcgaccacatcatcgttagtcaggagagcaaataatggatgcgaaacaacgtattgcgcgccgtgtggcgcaagagcttcgtgatggtgacatcgttaacttagggatcggtttacccacaatggtcgccaattatttaccggagggtattcatatcactctgcaaagcgaaaacggcttcctcggtttaggcccggtcacgacagcgcatccagatctggtgaacgctggcgggcaaccgtgcggtgttttacccggtgcagccatgtttgatagcgccatgagttttgcgctaatccgtggcggtcatattgatgcctgcgtgctcggcggtttgcaagtagacgaagaagcaaacctcgcgaactgggtagtgcctgggaaaatggtgcccggtatgggtggcgcgatggatctggtgaccgggagccgcaaagtgatcatcgccatggaacattgcgccaaagatggtagtgcaaaaattttgcgccgctgcaccatgccactcactgcgcaacatgcggtgcatatgctggttactgaactggctgtctttcgttttattgacggcaaaatgtggctcaccgaaattgccgacgggtgtgatttagccaccgtgcgtgccaaaacagaagctcggtttgaagtcgccgccgatctgaatacgcaacggggtgatttatgattggtcgcataagccgttttatgacgcgttttgtcagccggtggcttcccgatccactgatctttgccatgttgctgacattgctaacattcgtgatcgcgctttggttaacaccacaaacgccgatcagcatggtgaaaatgtggggtgacggtttctggaacttgctggcgtttggtatgcagatggcgcttatcatcgttaccggtcatgcccttgccagctctgctccggtgaaaagtttgctgcgtactgccgcctccgccgcaaagacgcccgtacagggcgtcatgctggtcactttcttcggtagtgtcgcttgtgtcatcaactggggatttggtttggttgtcggcgcaatgtttgcccgtgaagtcgcccggcgagtccccggttctgattatccgttgctcattgcctgcgcctacattggttttctcacctggggtggcggcttctctggaagtatgcctctgttggctgcaacaccgggcaacccggttgagcatatcgccgggctgatcccggtgggcgatactctgttcagtggttttaacattttcatcactgtggcgttgattgtggtgatgccatttatcacccgcatgatgatgccaaaaccgtctgacgtggtgagtatcgatccaaaactactcatggaagaggctgattttcaaaagcagctaccgaaagatgccccaccatccgagcgactggaagaaagccgcattctgacgttgatcatcggcgcactcggtatcgcttaccttgcgatgtacttcagcgaacatggcttcaacatcaccatcaataccgtcaacctgatgtttatgattgcgggtctgctgctacataaaacgccaatggcttatatgcgtgctatcagcgcggcagcacgcagtactgccggtattctggtgcaattccccttctacgctgggatccaactgatgatggagcattccggtctgggcggactcattaccgaattcttcatcaatgttgcgaacaaagacaccttcccggtaatgaccttttttagttctgcactgattaacttcgccgttccgtctggcggcggtcactgggttattcagggacctttcgtgatacccgcagcccaggcgctgggcgctgatctcggtaaaagcgtaatggcgatcgcctacggcgagcaatggatgaacatggcacaaccattctgggcgctgccagcactggcaatcgccggactcggtgtccgcgacatcatgggctactgcatcactgccctgctcttctccggtgtcattttcgtcattggtttaacgctgttctgacggcacccctacaaacagaaggaatataaaatgaaaaattgtgtcatcgtcagtgcggtacgtactgctatcggtagttttaacggtagtctcgcttccaccagcgccatcgacctgggggcgacagtaattaaagccgccattgaacgtgcaaaaatcgatagtcaacacgttgatgaagtgattatgggtaacgtgttacaagccgggctggggcaaaatccggcgcgtcaggcactgttaaaaagcgggctggcagaaacggtgtgcggattcacggtcaataaagtatgtggtagcggtcttaaaagtgtggcgcttgccgcccaggccattcaggcaggtcaggcgcagagcattgtggcggggggtatggaaaatatgagtttagccccctacttactcgatgcaaaagcacgctctggttatcgtcttggagacggacaggtttatgacgtaatcctgcgcgatggcctgatgtgcgccacccatggttatcatatggggattaccgccgaaaacgtggctaaagagtacggaattacccgtgaaatgcaggatgaactggcgctacatagtcagcgtaaagcggcagccgcaattgagtccggtgcttttacagccgaaatcgtcccggtaaatgttgtcactcgaaagaaaaccttcgtcttcagtcaagacgaattcccgaaagcgaatagtacggctgaagcgttaggtgcattgcgcccggccttcgataaagcaggaacagtcaccgctgggaacgcgtctggtattaacgacggtgctgccgctctggtgattatggaagaatctgcggcgctggcagcaggccttacccccctggctcgcattaaaagttatgccagcggtggcgtgccccccgcattgatgggtatggggccagtacctgccacgcaaaaagcgttacaactggcggggctgcaactggcggatattgatctcattgaggctaatgaagcatttgctgcacagttccttgccgttgggaaaaacctgggctttgattctgagaaagtgaatgtcaacggcggggccatcgcgctcgggcatcctatcggtgccagtggtgctcgtattctggtcacactattacatgccatgcaggcacgcgataaaacgctggggctggcaacactgtgcattggcggcggtcagggaattgcgatggtgattgaacggttgaattaatcaataaaaacacccgatagcgaaagttatcgggtgttttcttgaacatcgacggcgaaggtaaccccattaatcaccagtcaaaacttttcaccagcgtcagctcgccagcattacgcatcggtacaataaatgtttcctgtttctcattgacgcttccttcatcggtgatcagcgtcagttgggcggtggttaattccgtttcgctgcgcccaccatagtagttgatatacacctgatagcgcccgtgaattggcgcgggcatggcgaaaatctcgggtccgtaccccgtcgtgacatccatatccagtgcaccactgtttttcagcacggtgttaccgtaccaggcgtgttcgccatcgggcgtaacaacgtgaaggtcgaggtcggtattgtccgtatcccagctgagaaccagccgtaaacgtgcacgaatcgttcctgtacccggcgtactgtaaaactgcattttttgtcggctttgcccatccgggctgatgacctgcacgctgttgctgccttcagtgaaaatataagggcgtgcaaaactaccatcggattcaattctctgcggcatactggcaccgttgaccaccagccggccctgctgaactttacccgccgcagcataattctttattttgccgcggatctgcgcactgatattttgatcatctgccatgttgacggagctcgccgggtaattgatgctttgactaaaactggcatcttcgccctctgccggatgccagccactgagcggtgcatcaatctcgacttcctgcacaccttcactgtgagcgacagggctaagcgccaccagtaacaacggaagaaaaatctttcgcatagcattagtccattaataattgtcgggtcagcgtttcgatatagttctcatcaagcccggtgggataaccatcaaaggccaggtgcagatactcatgggttaaatccagccgatcctgaagcgtaaagaagttacgaataaacagccgtttctgctgccgatcggtataggggaaaccactgactaaacggcaaaccgcaaacacgtctggttcgttgtaccccgtctcagcttgtaatatacgccgccactgcggcatttttttcgccagccaggctttcgctttgggtaataactggcaggtactgcgtggcgctccccagcggctaagactgttgtcgggataagcaaacgcgagtatctgatcgtaacgctctccctgccccgcctgggccgtggcttgccgccaggaaagtgtcccttcggtagcgcgactgccatgataatgaaccggatcgcctgcatagatgagatcctgcgtccaggcggtcatcgttcgcgcccccgtggtcgctgggctagcagaaacacgctgcgtggcgctgctgtcggggatggtcaggcaatcgccttcccgattggcgttttgctgtaaaaaagtgcgaatcgccacggtcatggctttcgctgcctcagggggcgtacttttcgcctcgcgatccagaactctggcaacgtactcttcacgatcgagatggctctgcaatttcagtttgcccttttcgctcagtaaggtcgtctcaccgtggctgacaaacgtaatgtggttaccattagtaaacgtcacacgatagcgcccattaagtacgccgggatttactgccgtcgtactcttttccgctgtgattttcttcagcggatagcgggcaaacagctccacctctacacattgcccactggcaacctgcgtcggcactggcaaaacccgattaagcaccgtcgcataacgggttagtaccgttttgctggtgccactgccagtaacccacagcggtgtaccatcggttaaccagccagcaaaaccaccctgacggatttcctgtttatcatcggcaaaccagctccaggttttcacccgtacccgactaccgagcatggatgcgacaccgattttcgcctcgtccagcaccacatccagtaagacttcctgagctttgttttgcgcgggtaacgtcgctaaactatcaagcaggcttttaaccgttacgctggtttctggcttcagcgtagtcagagacgctaaccacgcaggtgcctgacgctgttgccagtattgcccccacacatctgcgccaatatgcaaccgctgcggcgcaaaatagagcccacaggaacgtaccagcgcggtatcgcgcgttatgctctccccagcctgacaacaataaacctcttccggggagtttccgcgacactggtagggctgctccggttgatgggtatcctccagccaggcgtaaacatacagtttccacaaactccctaacggcgtggtgaggctgtcaggtaatgcactgactttggtcacgccactactgctcagctgatacagttgatcgtgctgcgcaccgcgcagcaccagttgtaacggcgtctcctccgcaagtgttggcagagtaaccaacgccaatagccagacgattctgcgccagttcacttatttcacctgcatcccggtccattcactccctgccgcaacactttgctgcgcaggtgcataggaacgcacataacgagcaggaggcagaacgaattgccctttttgcgagaagcgcagcaaatggcggaaagtgaccgttcccgtcagttctttcaccggcaccatataggccagttcgcccatttcatttcgcgctttttccagcaattgcccctgctgtttcgcggcgttgggtttattgaccgaaatgccccatgttgtgcgctcaacgtcggctcccggtggcagcggtacttccacctgaccgtagcgcagaactgcatcctgctcgctggtaagcgtgatttcatcgagatacagcgcatcgctgtcaatctcattgctggtcaccggttgcagaataaagctcatctcttcttcaccagggataagccgatacaactggcgttcaacggtcaccggaatgttactttgttgagccatttttgccggctcacgtcagcggacctgcacattttgcggcgataattcgtcaccaaaagagagaatgtccggcacgccctgaccaacccaacgccagtcttcgccccctccagttaacttatgtttagcccatgcgcccgcaggcgcaggcaaaacaactggaggcattgtcgccatatatttcgccagccagttcatggccagcgcgcgctcaatagtggattgctcagcggtcaaaccacttaaaatagcggccgtctgggtagcgtcgccaccgctattaagcagcacaaccgtgtgcgccagcggctgattgctgtttgccgctttatcccacgcatattgctgaacctgtggcatcaccgtggacttcaactgcgcttttttcagcaacgtcatggttaagacgtttgccaccgcatctgccagtggagactccggtgtatcgaggatcaggctatcattgatatcgcgggtgtcttcctcagagaaatcttcagttttagttccgcgccgggcgatagcttcatccaaccctttcaacaacgttttgcacggcaaattcatctcctgcgcccatgccagcaccagcgcccgatgcaataacggcatgttatctgcctgctccgcgtagctgtcgagcatatgctgccagtattccggttgttgcgttacgccgatcgcctggctggcctgccagtcggcgtaccatgcccatgccgtaaggaaggcgtcaccattgccatcttcaccccaccaggtaaagcgcgctccgggccccgccagttgcatcagccgcagacggttatcctgaatcatctgacgaatgtcgttagcggcggcactttgatgatcggcaagcgaacgccaggcgagactgagcgggatcagacggctaccggtgttgattacgccaccccacggttcatcgactaacgcatcaagattgttgcggaaaatctcctgcggcgtttcactactttgtagccggatattgctcgcctgctcgggcaacatcagcgcgttatcgccaccaccgagcatgacatttttctgctgttcaacgggccagctgttatccacaaaagacagttttgtgctaatgctgtcctgcacttgcccattttgttgcagttctgcacttaacaagccagattgctgaatattctgcgtcagcgaaatataattcgcccctttgtgcagcgtcagcgtctggcgcatctcagcgcctgcaaatttagtcaccagcgccaccggttcgttatcctgctgactgaagataaacagtcctgccgccggtttgtcgcccacgcgatacaccgttggcatactccacttcatgtagagatttttttccgaacgcagataagcacgcccctgcccgaccagcccgtcgccgttcatcccacgcgcggtgatacgccagcgggttaacgaatcaggcatcaggaacgtgaaatacgctttgccttgtttatcggttgtgagtgacggcatccatgccgcggtatccacctcttcacgccgtggacgttcaagcatttttactcgccgctcgctgcggttagttgcgccaggcgcaaccggctcgctggagagcgcctggtcgtagctgataaacgacagactggagctggtacgcacattgttacgccccagcggatagaaaaatttgccgatattcggcgcgatttctggttgcagcgcgtagatcatttcatcgaccacgcctaccgttagctgcgcagaaacaggtttacctttcagcgacgaggttaattcgacattgaccagttcaccaggctggtaatgggttttgtccgttttcacccggatatccagctggggaacggcaactttgatcccggcgttctgaaaactgtactgaccgttacgggtatacagcaccgaaaaagtgatgttaggcgcaaaggaattgctcactggaacccgggcttcatactgggtatcgtttaaacgttgtagcgttagccagtttgccggatgcgaaagcagcgactgctgttccacgcgatcgcgttccagcgtcaataatgcttcatcaattggctccggaaaggtaatcagcatcttcgcggtttcgcctggctggtacagcgttttatccgccacgatatctaccgtaccagtatgcgccgtgctgcccttaccgctgacggcatgacttaacccagcgagaattaagccgtctttatcgcgtaatgtcagattgtagttgccaggtttagcgaaattgacggtaaaggatttgccgcctgacggtagctctccgctatggctcgtgcggtcttcgagacgcaaccattcatacgtaacaggaacctgttttgaagattccagcgcggcataacggaacacaaccgactcgccgctattactgtattgtgcggcagtacttaatgagtaatgcgccagaccgcgttcaatgaggatctctttggtggtggtgacgcgatacgccgcgccgtcactggcggagacggttaacaaatagcggctcggtttatcggcggcggggagatttaacgccacatgaccgctggcgtcggacaccgtttcgctgccttccagcgacacggggaaacgtccggcataacgcaaatcgttaccgaccattgataattgctgagcgcgcaaacttaactgcacgcgggcattttttaccggctcgccatccgggtagagcagttgcagtttgccgctgaccgcttcgccagttttgaactcttttttggcgagagctaaaccaatctcgaaatgtggcttgatgtagtttgccacgcgaaaactgctgctatagacctgattgcggtaagcaagacgtaactcataacctccggctacggcattttctggcaggcggaaacttccctgcccgccattgcgcgcatccagcgtgacattgacggtttgcaacagactgccgttggcgtccagcaccgaaagcttcgccggggcgctgacgatgggggatgaatgcaacggatcgtggaactcgcggccgatcactttaacatcgacacgatcgcctgcgcgatatagcgggcgatcggtaaaaatatacaagcgggtgttgtagatttcgctttcgtagaagaagttctcggagacaaaaacgccgccttcagcatccttacccagaatgtatgaacgttctggcgatatatgttgtaactgcaaggtaccgctgtcatcggtcacaccgcgggtcatcacgccaagaccgtcagtccacaagatctctgagccgggcttcgcttcaccctgttttttacccgcggtccacaccagaagctctttgcctgacactttgctaagcgccacggtatcggaaacaaacaccaccgtcgtcgcccgatacccaccaaccatcgcctcgacgaggtacagtcccggctcttgttggccgagaggaatataaatgttacccggctgcggcgagatgaaattgctggatgcgccttccagttttaccccttgctgcggctcgaacggtttagcctgccatagtggataacggaactgtttcaccaggggatattttttcagcggggaaaactggttgttctgtacataacgggaaggtttaataatggcattgccgagctgtaattcgggtaacgcctgagtcacattctgccgtgactgagaagagaaagtacgctgcatcacgcggcgagatttgccgtaccagttatcccacagccaggttagcgtattgttcagcccgtcgcccagatattgcggttgcaccacaatgcgatgcaggtttttctgctggcgcaaaaatgccatcgggtcaggaatacgatacaggcgaacgtccacgccgccgtactcttccatctgatagcgccgataatcacgccccggcgcttccagtcgcactttcgcctcttcactgctgctaaaactgctgtcagcaagcaaaaagaatgttcccccggcaggcggcgcatagttgctggaaggaagcgaatcatcagcattagcaagccctgttcccacaagagacagggacaagcacgctgttatcgcgccagaaaatttaaacgataaatgccaatgaaattgggattggaatcgttgggtatccatcgggtgtccttccatgtcataagttgttgcagactgactgcgcgcattccgttgtcagttttcgtggcgcttccggtgtggtagatgacgtaacgccccatccagaccattaagtgctgggcatcgccctgatcgaaaaaaatcatatcgccaggcagcgcctggtttatgtcctggccaataaactggctgttgtactgaatcaaattaatcgcggtcacataggggccggttttcccgttcccctgattccagttttgcgccagttgacgctgttcaggtgttagcgtcatctctggcggcaaatactggctagataaaccgttactttttagccatttactgtcgtgaactttcagcgtctcgttcgccgcaaatcgcaccaggcccgcacaatcctgctgataccagcgtggacttggcccctggcggagctgttcttgtgcaatgcgtacaaaccaggcgcgaaacagcccggattgttcgacattcagcatttcgctatgggcaacaacacaacacagccagcaaatcagcgccagcagcccgtgcctcatagcggctgccaggttatgggtagccactgccaggcggcaccgggttccatctgggccagcttcatgacataacgcggttgttgagataaagcgtccagcttcggcattaataaagtttgtgcggcgttataaaaaaccggttcgagattcttcggcagactggtcaacgtttcgttacgcagcagtttcgctattccttgtggattgatatagagcggaacgatgccatcagtgggtattacatccaccattgccgggcgggttttattcagtgtttgcagcgcgttattaaccagcgtgtcatcgagggagaaaagcagcgttttgttttgcatcgccaggctcacacggaaaaaataatcgctcattaattgatcgggttgcgccgcctgcgctttcggatactggccgtatcgggaactcacttcgcgacgccagatttgcgcttcgccctgctgagtctggcttaccggcaaaacaccttctggcgctttgctttcgtgcgcaccaatattttgcgtaaacagtttccctggcaattgcgcctgttcggcagtgccatcaaactgaccgacaaacagcggggtttgcaatttactgtcttcataccagcacagccccgcggcaccgtctaacgccccattcagcttgtcgttttcctggctgatgtggctaagcatctcttcggcaataccgtgactatacggcaccgccacacagaagctggctccggcaggcatactgttccataccggcgtaaaatcgaaactggcatctacgctggcggattcatcatttaacgccacaaaactgtgccagccgtcgttacccatttcgaagcgtacgccagcaaaagaaggcattaaccgctggtagccaaaccccagccacctggcgctgactacgatgcgctggcgtactggcgttttttcggcagtacgctcttccaggccaaagcttgcttgccagcgttttttgccgctcaacaaatcacctgcgatcgccgtggcttcggtatcctgctgatcatctttaaacaacatatccgtgctggaaaacaccagcatcttgtcctgataagtcgcgaacatcagggcgttattgccgttatagcgcaactgataaacaggaacagtttcactatttatcttgatgctactgatttccgttttgcttaactggctgtcgctggtagcggcaaacaacaatggctccagcagtttgcttaaaccactgcgctggatcagcaccatataatgactaagatggccttgtttatcgtgccacagcgctgcctgcgcgggctgatctaagagactgctaaagagcttatctttcagcgtgagatcgtgttcatagacaatacgacgaatgctgccttcaatgcccagacgatcggcatgattctgataatagaaaacgaaatcttcgctcagaacatcgtggagaaacggaatggtgaggagatctttgggaagctggctcagagagtcgctgtcgagaaagaggtccggctcattgagatcgatttgcagattgttgtgcaccaccagcgggctcaacgttttttctggcccactgccagcatattgcaacgcccagacgccagcggaaagcagtgctattgcgccaaaacctacaagaccatagaaccgccagcctttcgcctttttttcaccactcattgccacattccttgtgtatagccagccattttttacgggcacagccaaactttaccgtgccctaatacgacaaaagcccagactttgcagcctggacttttcaattcaaacaagggagatagctcccttttggcatgaagaagtaaaattattcttcttctggctcgtcgtcaacgtccacttccggagcgatttcatcgtccccttccgcggcactgccgtcgatggtatccagatcttcctcgtcaaccggttcagcaacacgttgcagacccactacgttttcatcttccgcagtacggatgaggatcacgccctgggtgttacggcccacgatgctgatttcgctaacgcgagtacgtaccagcgtaccggcatcggtgatcatcatgatctggtcgcagtcatctacctgtaccgcgccaacaactaaaccgttacgttcggtaaccttgatggagataacccctttcgtcgcacggctcttggttgggtattccgccactgcggtacgtttaccgtaaccgttttgcgttgcggtgaggattgcgccatcgccacgaggcacgatcagagagacgactttatcgccttcacctaagcgaataccgcgaacaccggtggtgttgcagcccatcgcacggacagaagactctttaaagcgcaccactttaccttcagcggagaacagcattacttcgtcttcgccgctggtcaggtcaacgccgatcagctcatcgccgtcaaccagtttgatcgccactttaccggcggtacgcagacggttgaactcggtgaggacagttttcttcacggtaccgttagcggtcgccatgaagactttcacgccttcttcaaactcggtcactggcaggatcgcagtgatacgttcgtcctgctccagcggcagcaggttgacgatcggacgaccgcgcgcgccacgagtggcttccggcaactgataaactttcatgctatagacgcgaccacggctggagaagcacagaatatggtcgtgagtgttcgccaccagcagtcggtcgataaagtcttcttctttaatacgtgcggcagatttacctttcccgccacgacgctgcgcttcgtattcagaaagcggctgatacttaacgtagccctggtgagagagcgtcacgaccacatcttcctgggtgatcagatcttccaggttgatgtctgcgctgttggcggtgatttcagtacgacgtttgtcaccgaactgttcacgaaccagctccagctcttcacggatcacttccatcagacgatcggcgctaccaagaatacgcaacagttccgcgatctgatccagcagctctttgtattcgtcgagcagtttttcgtgctcaagaccggtcagtttctgcaaacgcagatccagaatcgcctgagcttgctgttcggtcaggtagtacagaccatcacgcacgccgaactctggctccagccattccggacgcgcagcatcgtcgccagcacgttcgagcatcgcggcaacgttgcccagctgccacggattagcaaccagcgcagttttcgcttctgcaggcgtcggcgcatgacggatcagttcgatgatcgggtcgatgttcgccagcgccacggctaatgcttcaaggatatgagcacgatcgcgagctttacgcagttcgaaaatagtacgacgggtcaccacttcacggcggtgacgaacaaacgccgcgatgatgtctttcaggttcatgatcttcggctgaccatggtgcaatgccaccatgttgataccgaaagaaacctgcaactgggtctgggagtagaggttgttgagcacaacttcaccgaccgcatcgcgtttcacttcaatcacgatgcgcataccgtctttgtcagactcgtcacgcagcgcgctgatgccttccacgcgtttttcttttaccagttccgcaatcttctcgatcaggcgcgctttgtttacctgatacggaatttcgtggacgataatggtttcacgaccggttttggcgtcaacttccacttctgcgcgagcgcggatatacaccttgccgcgaccggtacggtaagcttcttcaataccgcgacgaccgttaatgattgccgccgtcgggaagtccggccccgggatgtgttccatcagcccttcaatgctgatgtcttcatcatcaatatacgccagacaaccgttgatgacttccgtcaggttgtgcggcgggatgttggttgccatacctacggcgataccggaagaaccgttcaccagcaggttaggaattttggttggcatgacgtccggaattttttccgtgccgtcatagttatcaacgaaatcgaccgtctctttttcgagatcggccatcagttcatgggcaattttcgccagacggatttccgtataacgcattgccgccgcagagtcgccgtcgatagaaccgaagttaccctgaccgtctaccagcatataacgcaggctgaatggctgcgccatgcggacgatcgtgtcatagaccgcgctgtcaccatggggatggtatttaccgattacgtcaccaacgacacgggcagattttttataggctttgttccagtcattgcctagtacgttcatggcgtaaagtacgcgacggtgtaccggcttcaggccatctcggacatctggcagcgcacggccaacaatgacgctcatcgcataatccagataggagctcttcagctcttcctcaatgttgaccggtgtaatttctctcgcaaggtcgctcatctaaccgctatccctctactgtatcccggattcaaaggtcgcaaattataacacagccgcgcagtttgaggtaaacctatacgctttattcacatccaatgcctgatatactcgtttgtcttgccaattacggagtagaagtgccaatgaatgccgaaaaaagcccggtaaaccataacgtagaccacgaagagatcgctaaatttgaagccgtcgcctcccgctggtgggatctggaaggtgagttcaaaccgctgcaccgcattaacccgctgcgtctgggctatattgccgagcgtgctggcggtttatttggcaaaaaggtgctcgatgtcggttgtggcggcggcattctggccgagagtatggcgcgcgaaggcgcgacggtgaccggtctggatatgggctttgagccattgcaggtggcaaaactgcacgcactggaaagcggcattcaggtggattacgtgcaggaaaccgtggaagagcacgcggcaaaacatgccgggcagtatgatgtggtgacctgcatggagatgctggagcacgtccccgatccgcagagtgtggtcagagcctgtgcgcaactggtgaaaccaggcggcgatgtctttttcagcacacttaaccgcaacggcaagagttggctgatggcggtggttggtgcggaatatattttgcgcatggtgcccaaaggcacgcatgatgtgaagaagtttattaaaccggcagaattgctgggctgggtggatcagaccagtttaaaagagcggcatatcactgggctgcattacaacccgatcactaatacttttaaactcggccccggcgtggatgtgaactatatgctgcacacgcagaataagtgaggttgatgtttggccgcgccaatgcctgatgcgacgcttgccgcgtcttatcaggcctacaaatgctccccgtaggccggataaggcgtttacgccgcatccggcaaccgtgccgactagacagtgattaccatttcaccgtcatgctcaaaaaccctgccgtctgggcaaaatcatcactccctttctgccacgccacgctgccgcgcagggacactcgctgactgatattgcccgtgactcccacttttatttcaccccgttgcttcaccgcatcgtcactgatagtgctgccatcctcttcaatttccgtgctatggggatcgtgataataattcagatctaatgttggtatgacatgaacagcggtacgccattcgctgtgtaaacccagccgcgtctgaatatcatcaccctggctttgactcacgcgcgcacggttagcggcggtaaaatcatcctgctgcacgccctgataaatcacctgcgcctgcggttcaatcaccacaccacgccccggtaaccactgataccccgcctccaggctggcgataatcccgctgctgtggtaatgatctgtgccatcttcttgttcggaaacatcattgctaaaccacgcgtattgcagccagctatccagccaggccccttgcttctgattaccgtgctgaaaccagctacttgtcagcccaacggcataaccgtggttctggttatcggcgcgagttccggtcatattgctgcggctgtcgccctggttatcgctgtagccaccaacaatcccaagcatccactcgccatccgtgccccagcgcccgctaaacagatcgccgctaagttgcaccgtagaagtgtcttcatgttgagccagttgccccgctgctgtgtaatgataatctccgccgataacacgtaaattcagcgtctgaccatcgccacctgcgtgatcgcgtcgctccatcataaacgcctgatttgccgcccgcaggttattaagataaccgccaactttggcattcaacaccggctggtaagcaggcgtaggttccgggtcgggtgttggatcaggatccggcgtgggatcaggatcgggagtcgggtctggatcaggtgggcttggcggcgttacttcttggcttcgcagataccagtcgttgttatcttccaccagcgtgtagtcatacgctcccatattgacgtagccgctgcctgccagactgaactgcgcattgttttgaaactgcgtgggatcagctgcgaaatcaaccactttaatgcctgtgcttgtcggctcaccaatccctgtaatggagttaaccaccacagttgtgttgccagcagtattaccgttcatcaccaattgatcgcttacgctgtcatcgccgtttaattcgctatcgagcagtagcgtaccgccgccggtataatcaccgtttaccgtcagcgtatcgccagcgacgccattttgcaggctaaccgcaccggacgtattggtcagattgccattaaccgtcacgttggaaagataagtcaggctgtcagtttcaaggttggtattaagctcacctgtcaacgtcacaccatcggtggcattcaccagcgtcccatcgccgttaaatagactggcattaagggcgacggaagtatcctgcccggtcaggcgcaaaaccgtaccatcgctgatgtcgatagtgccgctggaaatagcatcaatactctgaatatcctgatccgcgccagtaacgaacgttgccccatcaccaacccacagactgctagcataaggaaggatatcagcaacatcacctttcagggtgccttcttcgacacgtaccgcgctctgcgttgtaccgctggcggtcagctccagtgtaccagcccccgttttagtcaatgtgctaccctcatcctgatgctgcccgctgctgtcagccatcagtgcgccccactgcgtgtctacccccgcatcaactgccacttcaccgtcggcgcgcatttcaatatcacgtccgtggcctgccgcatcactacgcgtgtcaacgtcggaggtaatctccatcacgctttcttgttgcttatcggtaaagataacctggcggttatagtgggtatctccaagctggctgttgtcgctcaccatcagcgtaccggaggcgatttgtgttgtgcccaaataactattattgtttgccagacttacctgcccgtcgctcgcatcgaccaccacgtagacgccatctttcccgtcgccgccgatatgcaaattgtcgccacctgcaagatctaccacatcctgactgccgataaccgttccgctgctgccactgacttcaaggccatcgttgtaacttgtgccgctctgccaggtggagaaatcagagagatcgagcacaccgccgtttaacacgatgctctgcggatcgtcctggagagcggtaagatctgccgcgtcgccttccaggctaagcaccgcaccatcatcaacgactatatcgccggttagcgccatgctctgcgcccctgccagcacgtagctgccgttttgcgcaatggtgagctgaccagcaccttcgatgatgccagcaaaactgccctgattaacagtaacgttgccaccagcatcgatatttaaagtgccattctgaaagcccgtcaatgcgtgcacaaaagtttgttgggtgctgccaacgtttagctcagcctgattctgatactgatcaatactccctatcgtcagaccgtagcagtcttgcggatcgtcctggcaatgcgtatcgccgacattcatcagggagttgctgcggcccagggtaacttcaccgttttcaatctgcatctcaccagtaaagtcattgttatctgcattaagtaccagatcgccggaacctgttttggtgattaacccggtaccagcaatagagtcaacagctccgtcattctctgtattgccaataaccagcgtttttccgtcggcaatatcaaaggtaacttcacttaagccgagatacataaagccacccgccgcagaggaaggaccatctccatagcctgctgcgctattgttctcatcgactaacacgcctccgttctggctgtagctgtcatcaacagaaatatcaataagatagggagccgtcacgctattggtatatatcgccccgccataaccttcggcagtgttatttgtaaaggcagtgttatttactatcgtataaccactaggatgcttgctgtcgctattattatcggtaacatcgattgccccgccatcgccatcactgtaacttgtacttgtatatgcctggttgttatcaaaaataacatcacttaaataaacgtcattattaatggtataaattgcgccacctttgccatcattagcgatgttattgcgaaacatggcgttagtgacacgtaaatcgacggcaccagtatcgttagtaccagaagaatagattgcgccaccatagccgcctgcgacgttaccggaaaaaataacatcagtaagattcagcgtactgttttctttagcaaatatggccccgccgttattatattctcctgtaacggtgttattggcaaacagagtcattccagtttcattttctggtaatagactaaattccgctccttgttgcaaaaatacggccccaccgctggcgttattggtcatatcgctaaaaaccagccattgcccatcagcgatactccagtcctgcgtaatgccactaaggctttgcctgctggcctgacaactcgctttgacatcatatccctggcaactatcagtgaccgccgcgacaccgttagcagagaaaagagatgcaatcatactcgggagtaaagataaatactccttgcgtagaaagataatccgcatattaatctaaccatcattttctataagacggcgtatttaatcgcattatacgatatggaatatctttcttttgtaaattgttcaacccggtgcaatggctattttgttattatttgatgaataatatcagtgcgtcataattcaagttaataaccttcagggatatcagttatatttaaactaaattaaagtcatgaataattttcttataatataaggtaaattaacaaaatggcttagcatttaacaataaccgaatagaaaacaaccatttcgccatcaacaatctcttacattcgcttatatattgaccacaactgatacatcagattatgtgatgactcgtgcttagatcaatttttgcaatcattagcaaaaagattaataagccatctatatcaatttatctaacctattatgccgttcaagaaatcgccgaacagttatttttaacaaatttttctcttcccattgactttcccggacaccttgtctgacctaaggtgcgcgaaagccactttttccttcctgagttatccacaaagttatgcacttgcaagagggtcattttcacactatcttgcagtgaatcccaaacataccccctatatatagtgttctaagcagcttcccgtactacaggtagtctgcatgaaactattgcggaaagaattccaaaaacaggtacgacatacatgaatcagaatctgctggtgacaaagcgcgacggtagcacagagcgcatcaatctcgacaaaatccatcgcgttctggattgggcggcagaaggactgcataacgttagcatttcccaggtcgagctgcgctcccacattcagttttatgacggtatcaagacctctgacatccacgaaaccattatcaaggctgccgcagacctgatctcccgtgatgcgccggattatcagtatctcgccgcgcgcctggcgatcttccacctgcgtaaaaaagcctacggccagtttgagccgcctgcgctgtacgaccacgtggtgaaaatggtcgagatgggcaaatacgataatcatctgctggaagactacacggaagaagagttcaagcagatggacacctttatcgatcacgaccgtgatatgaccttctcttatgctgccgttaagcagctggaaggcaaatatctggtacagaaccgcgtgaccggcgaaatctatgagagcgcccagttcctttatattctagttgccgcgtgcttgttcagcaactacccgcgtgaaacgcgcctgcaatatgtgaagcgtttttacgacgcggtttccacatttaaaattagcctgccgacgccaatcatgtccggcgtgcgtaccccgactcgtcagttcagctcctgcgtactgatcgagtgcggtgacagcctggattccatcaacgccacctccagcgcgattgttaaatacgtttcccagcgtgccgggatcggcatcaacgccgggcgtattcgtgcgctgggtagcccgattcgcggtggtgaagcgttccataccggctgcattccgttctacaaacatttccagacagcggtgaaatcctgctctcagggcggtgtgcgcggcggtgcggcaacgctgttctacccgatgtggcatctggaagtggaaagcctgctggtgttgaaaaacaaccgtggtgtggaaggcaaccgcgtgcgtcatatggactacggggtacaaatcaacaaactgatgtatacccgtctgctgaaaggtgaagatatcaccctgttcagcccgtccgacgtaccggggctgtacgacgcgttcttcgccgatcaggaagagtttgaacgtctgtataccaaatatgagaaagacgacagcatccgcaagcagcgtgtgaaagccgttgagctgttcagcctgatgatgcaggaacgtgcgtctaccggtcgtatctatattcagaacgttgaccactgcaatacccatagcccgtttgatccggccatcgcgccagtgcgtcagtctaacctgtgcctggagatagccctgccgaccaaaccgctgaacgacgtcaacgacgagaacggtgaaatcgcgctgtgtacgctgtctgctttcaacctgggcgcaattaataacctggatgaactggaagagctggcaattctggcggttcgtgcacttgacgcgctgctggattatcaggattacccgatcccggccgccaaacgtggagcgatgggtcgtcgtacgctgggtattggtgtgatcaacttcgcttactacctggcgaagcacggtaaacgctactccgacggcagcgccaacaacctgacgcataaaaccttcgaagccattcagtattacctgctgaaagcctctaatgagctggcgaaagagcaaggcgcgtgcccgtggtttaacgaaaccacttacgcgaaagggatcctgccgatcgatacctataagaaagatctggataccatcgctaatgagccgctgcattacgactgggaagctctgcgtgagagtatcaaaacgcacggtctgcgtaactccacgctttctgctctgatgccgtccgagacttctagccagatctctaacgccactaacggtattgaaccgccgcgcggttacgtcagcatcaaagcgagcaaagacggtattttgcgccaggtggtgccggactacgagcacctgcacgacgcctatgagctgctgtgggaaatgccgggtaacgatggttatctgcaactggtgggtatcatgcagaaatttatcgatcagagcatctctgccaacaccaactacgatccgagtcgcttcccgagtggaaaagtgccgatgcagcagttgctgaaagacctgctcaccgcctacaaattcggggtcaaaacactgtattatcagaacacccgtgacggcgctgaagacgcacaagacgatctggtgccgagtatccaggacgatggctgcgaaagcggcgcatgtaagatctgatattgagatgccggatgcggcgtaaacgccttatccggcctacggctcggtttgtaggcctgataagacgcgccagcgtcgcatcaggctccgggtgccggatgcagcgtgaacgccttatccggcctacggctcggatttgtaggcctgataagacgcgccagcgtcgcatcaggcacaggatgcggcgtaaaatgccttatccggcattaaactcccaacaggacacactcatggcatataccacctttagtcagacgaaaaatgatcagctcaaagaaccgatgttctttggtcagccggtcaacgtggctcgctacgatcagcaaaaatatgacatcttcgaaaagctgatcgaaaagcagctctctttcttctggcgtccggaagaagttgacgtctcccgcgaccgtatagattaccaggcgctgccggagcacgaaaaacacatctttatcagcaacctgaaatatcagacgctgctggattccattcagggtcgtagcccgaacgtggcgctattgccgcttatttctattccggaactggaaacctgggtcgaaacctgggcgttcagtgaaacgattcattcccgttcctatactcatatcattcgtaatatcgttaacgatccgtctgttgtgtttgacgatatcgtcaccaacgagcagatccagaaacgtgcggaagggatctccagctattacgatgagctgatcgaaatgaccagctactggcatctgctgggcgaaggtacccacaccgttaacggtaaaactgtgaccgttagcctgcgcgagctgaagaaaaaactgtatctctgcctgatgagcgttaacgcgctggaagcgattcgtttctacgtcagctttgcttgttccttcgcatttgcagaacgcgaattgatggaaggcaacgccaaaattattcgcctgattgcccgcgacgaagccctgcacctgaccggcacccagcatatgctgaatctgctgcgcagcggcgcggacgatcctgagatggcggaaattgccgaagagtgtaagcaggagtgctatgacctgtttgttcaggcagctcaacaggagaaagactgggcggattatctgttccgcgacggtagcatgattggtctgaataaagacattctctgccagtacgttgaatacatcaccaatatccgtatgcaggcagtcggtttggatctgccgttccagacgcgctccaacccgatcccgtggatcaacacttggctggtgtctgataacgtgcaggttgctccgcaggaagtggaagtcagttcttatctggtcgggcagattgacagcgaagtggacaccgacgatttgagtaacttccagctctgatggcccgcgttaccctgcgcatcactggcacacaactgctgtgccaggatgaacacccttcccttctggcggcgctggaatcccacaatgtggcggttgagtaccagtgtcgcgaaggttactgcggctcctgtcgcacacgcctggttgcaggtcaagttgactggattgccgaaccgttagcctttattcagccgggggaaattttgccctgttgttgccgggcaaaaggcgatattgaaatcgagatgtgaattggttgtagtgccagatacaacgcttatgcgtcttatctggcctacaacgattacatggcgtagtaatacgctttcacctgctcccagtccgctttggggattggctccagatatttttccagctggcggaagtcatgattaatcgctttatcgcgacgcaagcggcgacgacttttctccaggtcaagaaaaccagcttctgcattaccttctgttttcacatagatatggcgaacataacaacagccatgctgacgattaatgctatgcattttcttaaacgccagcgccactgctttcaacatggcttgccgtacttcgtcagaataagggcttactgcatgctgggcataccagtcagcaatgctgatgaaccccgccatatcttcagtcaccagcaacgctcgccattcaccctcaattttcaccgcttcaccaaaaacgatcttcggcacgatgacaccggcccgttccagttctttaattaccgcaacctcacggacaatcgttggtcggccgaacggataacgtacggaatgaaacagatgatgcgtcatgcgctttacatacagctttttgccgttgcgctcgacgcattgcaccccgctcataccattacggcgatagttaggctcttcaacccagtcgccctctgttgcccaccagtgattaaattcgtcgtactttgcactaactgccataccctatcgcctgtcatttttattaacgacaatgactataggtggttacctgaggaaaatcttaatgaaacgtgtcgtattaatgaatttcttttgccactactagcttgacaccgcttttacccttcatttgcagcgcatagattccaccagccactaccactaatagtgcgcccagcagataaaatgtgaatttaatcaggcggatacagcgatgaattttattcgacagggattaggcatcgccttacaaccagagttaacgctgaaaagcattgcaggtgaattgtgttccgttcctctcgaaccaactttctatcgacagattagcttgctggctaaagaaaagccggtagaaggcagtccactgtttttactacaaatgtgcatggaacaattagtggcgattggaaaaatttgatatgagacaggatggcgcatgaacgccatcctgcagtaacattactctttattaagaaattttactgccttatcagggaaatcagtaaacagcccatttacacccgctttgttatacagagcatcatataactgattcacatcaggagtgtattcaggcagtttatcactccgcacggtataaggatgcactaccagtttattctgctgagcatcttgcaccatgccagtgagtttgatattacccggctggcttgtctcctcaatcaacatatggtaatccggaccaataccatctgcatattccgccacctgtttcatggcacccggcttaaacatccagtcgtagttgtaattaacccagcttccatccggctgtttctgctgcgtttcattccagtcggtataggcaatcagctgtaccagattgagctccatgcccattttgggttccagctcattcttaatacgcttcagctcatcagcatcaaaacattgcaaataaactttatcgtctttaccggtgtaaccatatttcttcagcacttccagcgtttttgccgcaatatccttcccttcctgatgatggaaccacggcgctttgatttctggataaataccgatatttttcccggtagagtgatttaacccctgaacaaattcaatctcttcttcaaaggtgtgcacccggaagtcggacttacccattgggaaacgccccggataagtctgcacttttttaccgttttcaatatcgaaaccttcggtaaatttcaagctcttaatttcatccagcgtgaaatctatcgcgtagtaacgaccgtctttgcgcgcccgatccgggaaacgatcggcaacatcagtaacacgatcgaggtaatggtcatgcagaacaaccagattgtcgtctttggtcatcaccaaatcctgttccagataatccgctccctgcgcatacgccatcgcttttgctggcagcgtatgctccggcaaatatccactggcaccgcgatgggcgatgactattttttcgttgctgtccgccgccattgcactgcttcccatgactatagtgctcatcatgatcgccatgctaaggtttttcagcgtcaatttcatgccattagcctccgttgcgttcttgcagtaattgttcatggcgacgtttttcgccaatcatcacaacaatcaacaagataaccgccagaatgctgccgccaatcattaccataaagccgccatcccagccgaagaagtccacggtgtagccaacaatcgcgctcgccgccacgctaccgcccaggtaaccaaacagcccggtaaagcccgctgccgtacctgccgcttttttcggtgccagttccagcgcatgcagaccgatcagcatcacaggaccgtagatcaggaagccgataacaatcatacaaatcatatcgacggttgggttacctgccgggttcatccagtaaacgatagtcgcgatggtcaccagtgtcataaagaaaacgccggttgccccacggttgccacggaagactttatcgctcatccagccgcacagcagagtgcccggaatacctgcatattcataaaggaagtaggcccaggaggatttatctagcgcgaaatgcttaacctctttcagataagtcggactccagtcgaggatgccgtaacgcagcagataaacgaacacgttggcgatggcgatataccacagcagtttgttcggcagtacgtactgcatgaagatttgcttcgccgtcagctcctgttccgctttttcgttatagtcgtccggataatcatttttgtactcttcgatcggcggcaagccacaggattgcggggtatcgcgcatcatcgcaaaggcgaataatgccaccagaatggcgcagaaagcaggcatatagagcgccgcatgccagtcattgaaccaggccatccccagcaggaacagcagcggcggaataccaccaccgacgttgtgcgcacagttccacacactcacaatgccgccacgttctttctggctccaccagtgcaccatagtacgaccacacggcggccaccccatcccctggaaccaaccgcagaggaacaacagtacaaacatcaccgcaatgctgctcgtcgcccatggcacaaagcccataaacaacatcactgccgccgccagaatcaaacctgcgggcaggaaaacgcgcggattgctgcgatcgcttacgctacccatgatgaatttgctaaatccataagcaatgctgatcccgctaagggcaaaacctaaatcaccgcgactgaatccctgctcaaccagataaggcatagcaagcgcaaagttcttacgaaccaaatagtaagccgcatagccaaagaatatccccaggaaaatttgccagcgcaatcgacgataagtcggatcgatctccgcggcaggtaagcgcgctttgtgtggcgctggtttaaaaatactcaacattgatagcctccgtggcccgtggtcttatttatgattaacagcctgattcagtgagagaacctgccgtttcttgagttgccgcgatgttaagaaaacattcataaattaaatgtgaattgccgcacacattattaaataagatttacaaaatgttcaaaatgacgcatgaaatcacgtttcactttcgaattatgagcgaatatgcgcgaaatcaaacaattcatgtttttactatggctaaatggtaaaaaacgaacttcagagggataacaatgaaaactcgcgacagccaaagtagtgacgtgattatcattggcggcggcgcaacgggagccgggattgcccgcgactgtgccctgcgcgggctgcgcgtgattttggttgagcgccacgacatcgcaaccggtgccaccgggcgtaaccacggcctgctgcacagcggtgcgcgctatgcggtaaccgatgcggaaagcgcccgcgaatgcattagtgaaaaccagatcctgaaacgcattgcacgtcactgcgttgaaccaaccaacggcctgtttatcaccctgccggaagatgacctctccttccaggccacttttattcgcgcctgcgaagaagcagggatcagcgcagaagctatagacccgcagcaagcgcgcattatcgaacctgccgttaacccggcactgattggcgcggtgaaagttccggatggcaccgttgatccatttcgtctgaccgcagcaaacatgctggatgccaaagaacacggtgccgttatccttaccgctcatgaagtcacggggctgattcgtgaaggcgcgacggtgtgcggtgttcgtgtacgtaaccatctcaccggcgaaactcaggcccttcatgcacctgtcgtggttaatgccgctgggatctgggggcaacacattgccgaatatgccgatctgcgcattcgcatgttcccggcgaaaggaagcctgctgatcatggatcaccgcattaaccagcatgtgatcaaccgctgccgtaaaccttccgacgccgatattctggtgcctggcgataccattagcctgattggtaccacctctttacgtattgattacaacgagattgacgataatcgagtgacggcagaagaggttgatattctgctgcgtgaaggggaaaaactggcccccgtgatggcgaaaacgcgcattttgcgggcctattctggcgtgcgcccgctggttgccagcgatgacgacccgagcggacgtaacgtcagccgtggcatcgtgctgctcgaccatgctgaacgcgatggtctggacggatttatcaccatcaccggtggcaaactgatgacctatcggctgatggctgaatgggctaccgacgcggtatgccgcaaactgggcaacacgcgcccctgtacgactgccgatctggcactgcctggtagtcaagaacccgctgaagttaccttgcgtaaagtcatctccctgcctgccccgctgcgcggttctgcggtttatcgtcatggcgatcgcacgcctgcctggctgagcgaaggccgtctgcaccgtagcctggtatgtgagtgcgaagcggtaactgcgggtgaagtgcagtacgcggtagaaaatttaaacgttaatagcctgctggatttacgccgtcgtacccgtgtggggatgggcacctgccagggcgaactctgcgcctgccgcgctgccggactgctgcaacgttttaacgtcacgacgtccgcgcaatctatcgagcaactttccaccttccttaacgaacgctggaaaggcgtgcaacccatcgcctggggagatgcactgcgcgaaagcgaatttacccgctgggtttatcagggattgtgtggtctggagaaggagcagaaagatgcgctttgatactgtcattatgggcggcggcctcgccggattactctgtggcctgcaactgcaaaaacacggcctgcgctgtgccattgtcactcgtggtcaaagcgcactgcatttcagttccggaagcctggatttgctgagccatctgccagatggtcaaccggtgacagacattcacagtggactggaatctttgcgtcagcaggcaccagcccatccttactcccttctcgagccacaacgcgtgctcgatctcgcttgccaggcgcaggcattaatcgctgaaagcggtgcgcaattgcagggcagcgtagaacttgctcaccagcgggttacgccgctcggcactctgcgctctacctggctaagtagcccagaagtccccgtctggccgctgcccgcgaagaaaatatgtgtagtgggaattagcggcctgatggattttcaggcgcaccttgcggcagctagcttgcgtgaactcggccttgccgttgaaaccgcagaaatagagctgccggaactggatgtgctgcgcaataacgccaccgaatttcgcgcggtgaatatcgcccgtttccttgataatgaagaaaactggccgctgttacttgatgcgcttattcctgtcgccaatacctgcgaaatgatcctgatgcccgcctgcttcggtctggccgatgacaaactgtggcgttggttgaatgaaaaactaccttgtagtctgatgcttttgccaacgctgccgccttccgtgctgggcattcgtctgcaaaaccagttacagcgccagtttgtgcgccagggtggcgtgtggatgccgggcgatgaagtgaaaaaagtgacctgtaaaaatggcgtagtgaacgaaatctggacccgcaatcacgccgatattccgctacgtccacgtttcgcggttctcgccagcggcagtttctttagtggcggactggtagcggaacgtaacggcattcgagagccgattctcggccttgatgtgctacaaaccgccacgcggggtgaatggtataagggagatttttttgcgccgcaaccgtggcagcagttcggtgtaaccactgatgagacgctacgcccgagtcaggcagggcaaaccattgaaaacctgtttgccatcggtagcgtgctgggcggatttgatcccatcgcccagggatgcggcggcggtgtttgtgccgtcagtgctttacatgccgctcaacagattgcccaacgcgcaggaggccaacaatgaatgacaccagcttcgaaaactgcattaagtgcaccgtctgcaccaccgcctgcccggtgagccgggtgaatcccggttatccagggccaaaacaagccgggccggatggcgagcgtctgcgtttgaaagatggcgcactgtatgacgaggcgctgaaatattgcatcaactgcaaacgttgtgaagtcgcctgcccgtccgatgtgaagattggcgatattatccagcgcgcgcgggcgaaatatgacaccacgcgcccgagcctgcgtaattttgtgttgagtcataccgacctgatgggtagcgtttccacgccgttcgcaccaatcgtcaacaccgctaccagcctgaaaccggtgcggcagctgcttgatgcggcgttaaaaatcgatcatcgccgcacgctaccgaaatactccttcggcacgttccgtcgctggtatcgcagcgtggcggctcagcaagcacaatataaagaccaggtcgctttctttcacggctgcttcgttaactacaaccatccgcagttaggtaaagatttaattaaagtgctcaacgcaatgggtaccggtgtacaactgctcagcaaagaaaaatgctgcggcgtaccgctaatcgccaacggctttaccgataaagcacgcaaacaggcaattacgaatgtagagagcatccgcgaagctgtgggagtaaaaggcattccggtgattgccacctccagtacctgtacatttgccctgcgcgacgaatacccggaagtgctgaatgtcgacaacaaaggcttgcgcgatcatatcgaactggcaacccgctggctgtggcgcaagctggacgaaggcaaaacgttaccgctgaaaccgctgccgctgaaagtggtttatcacactccgtgccatatggaaaaaatgggctggacgctctacaccctggagctgttgcgtaacatcccggggcttgagttaacggtgctggattcccagtgctgcggtattgcgggtacttacggtttcaaaaaagagaactaccccaccagtcaagccatcggcgcaccactgttccgccagatagaagaaagcggcgcagatctggtggtcaccgactgcgaaacctgtaaatggcagattgagatgtccacaagtcttcgctgcgaacatccgattacgctactggcccaggcgctggcttaaactcctttctgatgcccggtaagcatgtggttaccgggcatttttgcgtacacgattccgtgcccaatgtatgcgttgcaacgcagtgaaaattcctctgaaaacgtctcgcaaaggctgaaactggcagatgtcaaaggcctgggataaccgtaatgtcgcgtcatcataaatatcaggtgacggacaaccatgaccgaaagtacaacctcctccccgcatgatgcggtatttaaaacctttatgttcacacccgaaaccgcacgggattttctcgaaatacatttaccagaaccactgcgcaagctttgcaacctgcaaaccttacgcctggaacccactagttttattgaaaaaagtttacgcgcttactacagcgatgttttgtggtccgtggaaaccagcgacggtgacggctatatctactgcgtgattgaacatcaaagctctgcagaaaagaatatggcttttcggctaatgcgctatgccactgccgccatgcagcgtcaccaggacaaaggctatgacagagtcccgctggtggtgccgttgctgttttatcatggcgaaaccagcccttacccgtacagtctcaactggctggatgagtttgacgatccgcaacttgcccggcagttgtacaccgaagcttttctgttggtggatatcaccatcgtacctgacgatgagatcatgcaacatcggcgtatagctctgctggaactgattcaaaagcatattcgcgaccgcgatttaatcggcatggtcgacaggatcaccacgcttttggttagaggcttcactaatgacagccagctacaaacactgtttaattatctgctgcaatgcggcgatacctcccgtttcacccgttttattgaggagattgccgaacgtagtccactacaaaaggagagattaatgactattgctgaacggctacggcaggaagggcatcaaattggctggcaggaaggtatgcatgaacaagccattaaaattgctttgcgcatgctggagcagggctttgaacgtgagattgtgctggcgacaacccaactcactgatgctgatattccgaactgtcattaaaaggagagattaatgactattgctgaacggctgcggcaggaaggacatcaaattggctggcaggaaggtaaattagaaggtttgcatgaacaagccattaaaattgctttgcgcatgctggaacagggctttgatcgtgaccaggtgctcgcggccacccagctaagcgaagccgatctggcagcgaataaccactaattaacacaggcccacagccgatccccatgggcctttgatatcaataactaccttttatgcgtggcccatttttgccacttttaaacatcgccagtcgttgatccagggcatcgctgtagagcatcgtgtcaacgccaacagcgacaaagttcgctccccacgccaggcattgctgcgccatatcaggagccacagccagaaaaccagccgctttacccgcagcacggatccgccgaatactggtttcaataattcgctgcacttccgggtgcccggcgttatccgggtagcccaagctcgcagaaagatccgcaggtccaataaacacgccatcaatcccttcgacgtcgaggatttcgtccaggttatccagtgccgttttactttccacctgcaccaacagacaaaggctatcgttaacttgcgccatgtaattctcaatgcgtccccagcgcgcagcccgtgccacactggccccgacaccacgctcaccgtagggaggatagcgcgtggcagacaccacctgacgtgcctgttcggcagtatcgaccatcgggatcagtagagtttgcgcgccaatatccaggacttgtttaatcagcggtttactgccttccaccggacggatcacgggttggctggcatagggcgctaccgcctgtagctgatgataaagatcctgaatggtgtttggcgcgtgctccccgtcaatcagcaaccagtcataaccagaagtggcggcaatttctgccatataggcagtcgtactgcttaaccacagaccaatttgcacttcgcccttgcgtaaacgttctttaaagggattgcttaataatgcgttcatcgtgttccttaacctatttaatgatgtgccacgtcggtctgcgcaacagtgcgatttacacgcagagtgaaaataatcaggctaccgatgaccgccaccgctgccagcgtcagtaatcccgccgcatcgctggcaaataacgtttctgctttcacgcgcaggatcggggcaataaacccgcccactgcaccaaacaggtttacaaaaccaattcccgcagccagcgccgtaccggaaagcagttgtgtcggcatcgtccagaacactggctgcacggcaataaacccgatagctgcaacacacagcgctacgatcgccattactggagaaagcagcccggacagaccaataccaatgcccgccgccagtaatgtcagcgctgcgacattacgccgttcgccggttttatcggaatagcgcggaataagccaggtcccaaacaaggccgcaacccacggaatggcggtgaccacgctcgctgtaaagcccacttttgttcccagcaatgccgcaacctgggtcggcaggaagaaaattaatccgtaaaccgccacctgaatggtcaggtagataatcgctagttgccagactcggccattacgcagcgcatcgctcagccgagaagtcactttctgttgttcttcacttgccagttgattgataagcaacgttttttcttgtttactcagaaaacgtgcctgctccggtgtgtcatcaagccaaaagaatgtgaataccccagcaccgactgccaacaatccttcaatcacaaacatccagaaccagccgggatgccccataaatccatgcatctccaacagcgcgccggaaagcggacttcccagtgttaacgccagcggtgcgcccatatagaacagccccataatgctggcgcgattacgctgcggaaaccattggctggtgagataaatcataccagggaaaaatccggcctccgcagcacgaagcagagtgcgaactatcagaaatttcgcttcagtatcggcccatgccatggctgcgctaagaaatccccacagcagtgttgtcgtaccaatccaggttctggcccccagtttgcgcatcaaaagattcgccggaacacccagaaacgcatataccacaaagaaaatgcctgctcccagcgcataagcttcattactcaacccggtatcaatctggtaggtctgtttggcaaaaccgatattgctacggtcgagaaacgccagcacatacagcgccaacataaacggaattaaacgcacacggtttttcttcaccacggcgtcaagcaaagcggtgctcataaaaagctccttagaatatgtgggcgttaccgttgtcacagcaacgcccggagtgattagtggctgtaggggcgtttcaaattgcagtcacgattgagttcgacgccaaaaccgggtttatcaagcacacttttatgaatacgaccattcaccggaaccggctcattgagcagaatcgggtcaaactgcggacgcatcgtactacaatccgggctggtcatcaggaattcgctgaatggcgtattggtgaaggtgatcaccgcatggtgagagtaaacagagctaccgtgcggcaccaccagttgccccctggatttggcgattgcggcaatttccaccagcgtggttaaaccaccgcaccagccaacatccggctgcataatgtcgataccggtttcactaagcgtacgaaaagattgcagtgtgccgtggtgctcaccgctggtgaccatcattccgactggcgcgttgcgtttcagttcgcgataactttcatactgctgtggcggcaggcactcttcgatccatttcaggttatagggcgcgcaagcgtgggccagtttggtcgcatagttcacgtcctgactcatccagcagtcgagcattaaccagaaatcctcaccgcatttttcacgcatatccgcgaccatagcggcatctttgcggatccccgcatcgccatcatgtggcccccagtgcgtcggcattttgccaccgataaagcccatctcttttgccagatccggacgcgcacctgtggcgtagaactgaatctcatcacgaacagcgccgcctaaaagtttataaaccggaagcccgaccactttgccgaacagatcccacagagccagatcgacacaagaaatcgtattcatcaccaggccaccagagccggagtaatacagggtggcactgagcatttgatcgtggatcagtttgatatcactgacacatttaccctcaatgaaacggttaagatgtttttcgacaataaaacagcccatttcaccggctgtgctaacggcgaatccggtctggccgttttctgcttcgacttcaacaaccaacgtgccaagaacgttaatgccaaaactctggcgactctgctcgtaatcgcggtatttactcatcggggtggcaatatgatcgtctatccagtgattcgccccctggtcgtgataatcaccgccgccagcgcctttttctgctgtcgcaccgccagtaaaccaggcgcgaacctgtttaatttttggtagggtcatgatgttctccattgttaactggcttgtaagtcaaagggacttttccatcccaacagacgactaatatccctggcgcaggcaatggccttgcccgccagataatcacggtattcttcattgatttgtaagcgggtaccgaccacgctgatcgcagcggtaagctcgttattggcgttaaacaccggcgcagcgacacaacggacatcggcgtaatcttcgccgttgtcatagctccagccctgacggcgaatacgcgccagttcttcgtgaagttgctgtggatgagtaatcgttgtgggtgtcgcctgctcccagaccagcccttcgataatactttgctgtaccgctgcaggttgccaggcaagcaggcatttacctattccggagcgataaaggctaaggctttttccttcatgggaacgcacgctgatagtggcactactctccactttcaaaatgtaataagcgctgccgttatcaataatccccaggtgacataacagcccggtggtatccatcagttgcgtcaaacgcggtcgagccagttcccggagatccatcttgcttaacgcatgaccggaaagctccaccagcctggtccacaaacaaaaattttcctggtgatcaaggctaagaaaacgctgacgcctgagttcattaagcagcaaataggccgtgcttttagggattcccaatgtgtcaatgatcgtcgcagcactacaggggccaatgcgggcaatcaaattgagaatatcaatagcccgtgtcagggcgggaactttgctactttccaacatactggactccagtcttagatactggaatcagtctcgttgctcagggggagtaaaattgtgaagcgcatcaaatcccgctcctcgtccagcagactggagaaattacgcacaaatttgtgaatcagcgcacggattttttcttattgagtacaacaggttggacaaattttgccggagggggaatgtgccggtgcagtaaaccggcacagagtggcggaatcagacagataaggtcatggactcaacaacctcaatccagccatgctcactggcgatatcctggccgtttaaccaacggcgcagcatattcagtgccatcattgcgcacacttcctgacggatagccaggctgtagcgcgtagtgctgaaacgcacacgcagagcgaaagtgccgtctggcgtggctagcgcaaagttgagatgctcgttctcgaaaccgctaacagccagtgccagcccggcaaaatggttggcccgccgttctgtaatccagtgcgcagtttgcgccagggtttcctcctgactaggaaccacttcacacgccagcaatggagcacctgcgcgagaaagttgcaaagccaataaaccaccggtgaattgctcgctcaacgtcaggctgaactggcggttttgcaattcgcgactgatctgcgcgggcagtccttcagtgccttcgaaaatcacgctctgtccggcaacacgtttaacatccagccacagtttttccatcgcctgttgctcgcttgccggtccggtgagtttcagttcgatgataggcatactggagcgatagcccattgttacgcccggcggcagttgtagagtgtccaggctttgtgccagatcgctttcgctacgaccaaaagtagtcaaacgcagacaaaccggcggctgcggtaaagaaaaacgctcgcgcaggcgcggcaggatttcgtgctcgaccatcaccttaaattcactcggtacgccgggagtaaagaacatcaggcaacgattaagctgcacggcaaaaccacaggcggtgcctaccgggttattgataaattcagcactggcaggcagctccgcttgtttacggttgctcggtgccattactcgtccacgttcgtggaaatagcgttccatctctttgagccaggcttcatgcagcaccaggccttcaccttttgctgtcgcagcggcgagtgcgcttaaatcatcgctggtcggtcccagcccgccgttaacgatcagcacatcggcgtgctgactacgttcgcgaagaatggtgactaagtcatcaaggttatcccccaccgtattgcggcgagataatggcaacccctgatgaaagaaaaaatcggccagccaggcagcgttagtgtcaacgatttgcccgtgtaacacttcatccccggtggataacatttccacttttaacatggttatctcctgcttttgttatcgaatcactataacgcaaagggagataaggcgtagtaagaaactgaatggcgcgacagaatgccgcgccggaagggatcagaaactggcgttaaccccaacatacgggccgtcagccacggcgttgtcgcggttaccgtctttaccgctcagattcaggtagcgataacccgcctcaatactgactggacgcataatggtgtaacgcgcgccagcattcgcttcttcataactttgaataccgctggagaggctatccggagagtagtaatactcgccaaacaaacggaagctgttgccaattttccactgcaaaccacctcctaccgctgcggcataaccttcatcgccgtaattcgggttggtgtaaacgccttttccgccaacggtcgccattaacggcccgagaggcagattcaaccccagccccacgccagcgacatcaccgtcgtcgtcgttatgtgtccagttaccgcttaacgccaggcccgtcgtttcagtcccaaaaccgacaccaatattggtgtattctttacccgcctgaccgctgatgctcattgcattgacgcttgcagaaaccaacagcattccggccagacctgctagcgcaatttttttcattatcccctttcccacaagcaattaatcaaaattcccaaagctgcgggattgtactgcctggcacagaggattcaatgagcgaaaaaaaggatctagtcacttattgtaactaaatacttcttaaataattaaatgccgaaaaaataaacacactttatcgatacacacaaaaataataataagtacagttatcatcgcaaaagagattactgtcactttcacatatttgtgagttaccgtattctcatggtttctttttatttataaggaatatccctgtgcgacaacggactattgtatgccctttgattcaaaatgatggtgcttatttgctgtgtaaaatggccgacgatcgcggcgttttccccggtcaatgggcgattagcggtggcggcgtggagcctggcgaacgaattgaagaggcactacgccgcgaaattcgcgaagaactgggagaacagctgcttttgacagaaatcacgccgtggaccttcagcgatgatattcgcaccaagacgtatgcagatggtcgcaaggaagagatttatatgatttacctgatttttgactgcgtttctgccaaccgagaagtgaaaataaacgaagagtttcaggactacgcgtgggtaaaacctgaagatctggtgcattatgatttgaatgtcgccacccgaaaaacgttacgtttgaaaggtcttctgtaacaatgatgacagccattactggctgtcagattgaaaatttagtggttaacgaattccccatccagataaactttgcctttttccacatgcatgactaaaccatccagataatcaggtttaaatgtcgcgtcacgcttatctttagcaatatatgtcaggcaatgattatgggtgaaaataacgatatttttatcaggcgctttgctttgtaagtccttaattgcactataaatctcattaccgcactgaagaagtcgtttatctaccgtcaattttttacccgcactaaaccaggtagcgctctgaatggtccggacggtattactggaataaagatcgaaatcagggatatcagcactaaaagcgttgcccagttcacgggcatcctgggtacctttaaccgtaatacctgttttatcactcaagcattgattggtactacggtcgcaacgttcagcatgacgaaacaaaacgacaaccgggtgctgctgtgccagtctggccagtgttttattgtcgatacgtggcaaaccattgctactccaggcggcatgagtacccagtccggcaattgcagcgagcgccagtaaaatgatgatatattttttactcttcaagctagagcggcaaaaagctaacacgtaaactccacctatagacaagcgcaaccagacaattaccgtgaaattgagctacatttctggcgataattcgcagttggtgtaatattaaaaatcctacgatgtcggcaaaatgcctcaaaattttgccaaatgcaaagcctaaataagaaaaaatataaaaatttcaatatttacgtctaatattagtttcttaaggttaagttaatattctatccttaaaatttcgctccaaatggcaaaatatacacaacactctttatagcaaatataagtggacaggtattcaatggcggaaggaaaagcaatgagtgaatttttgccttttagccgaccagcaatgggcgtggaggaactcgctgcagttaaagaggttctcgaatccggttggatcacaaccggtccgaagaatcaggcgcttgagcaagctttttgccagttgacgggaaatcagcatgccatcgcggtcagtagtgccaccgccggaatgcatatcacgctaatggcgttgaaaattggcaagggcgatgaagtgattacgccttccctgacctgggttagtaccctcaatatgatttccttgttgggtgcaacgccggtaatggtggatgtcgaccgcgatacgctgatggtcacgcctgaagctatcgagagtgccattacgccacgcactaaagccatcattccggtgcattatgccggtgcgccagcagatattgacgccattcgcgccattggcgaacgttacggcatcgcagttatcgaagatgctgcccatgccgtcggtacgtattacaaagggcgacatattggcgcaaaaggtaccgctatttttagttttcatgccattaaaaatattacctgtgctgaaggtggcctgattgtaactgataatgaaaaccttgcccgccagctacggatgctgaaatttcacggtctgggtgtcgatgcctatgacagacaaacctggggccgtgcaccgcaggctgaagtcttaacaccgggctataagtacaatctgaccgatattaacgccgcgattgccctgacacagttagtcaaattagagcacctcaacacccgtcggcgcgaaattgcccagcaatatcagcaagcactggcagctctcccctttcagccattaagccttcccgcctggccgcacgttcacgcctggcatctgtttattattcgtgtcgatgaacaacgttgtggtatcagtcgcgatgcgttgatggaagcgttaaaagaaagaggcattggtaccgggttacatttccgcgccgctcacacacaaaaatattatcgcgagcgttttcccacgctgagcttaccgaataccgaatggaatagcgaacgcatctgttctttgccgctgttcccggatatgactaccgccgatgccgaccatgtcatcacagcccttcagcaactcgcaggacaataagccatgtttgaaatccaccctgttaagaaagtcagcgtggttattcccgtttataacgagcaggaaagcttaccggaattaatcaggcgcaccaccacagcctgtgaaagcttggggaaagagtatgagatcctgctgattgatgacggcagtagcgataattccgcgcatatgctggtcgaagccagtcaagcggagaacagccatattgtgtctattttgcttaaccgcaattacgggcaacatagtgcgattatggcgggattcagtcacgttactggcgacttaattattacccttgatgccgatctccagaatccgccagaagaaatcccccgcctggtggcaaaagccgatgaaggttacgacgtggtagggactgtacgccagaaccgccaggacagctggtttcgtaaaaccgctagcaagatgattaaccggcttattcagcgcaccactggcaaagcgatgggtgattacggttgtatgctgcgcgcctatcgccgtcatattgtcgatgcgatgttgcactgccatgaacgcagcacctttatcccgattctggcgaatatcttcgcccgccgtgccattgaaattccagtacatcatgccgagcgtgagtttggtgaatccaaatacagttttatgcgcctgattaatttgatgtacgacctggtgacctgccttaccacaacgccgctacgtatgctgagtctgctcggcagcattattgcgattggaggttttagcattgcggtgctgctggtgattttacgcctgaccttcggaccacaatgggcggcagaaggcgtctttatgctatttgccgtgctgtttacttttattggcgctcagtttatcggcatgggattactcggtgaatatatcggcaggatctacaccgatgtccgcgcccgcccccgctattttgttcagcaagttatccgtccatccagcaaggaaaatgaataatgaaaaccgtcgtttttgcctaccacgatatgggatgcctcggtattgaagccctgctggctgccggttacgaaattagcgccatttttacccatactgataatcccggtgaaaaagccttttatggtagcgtggctcgtctggcggcggaaagaggcattccggtttatgcgccggataacgttaatcatccgctgtgggtggaacgcattgcccaactgagcccagatgtgattttctctttttattatcgccatcttatttacgacgaaattttgcagctcgctcccgcaggtgcatttaatctgcatggtagcctgttaccaaaatatcgtggtcgcgcgccgctgaactgggtgctggtcaacggtgaaacggaaactggcgttacattgcaccgaatggtgaaacgtgccgatgccggggccattgtggcgcaactgcgcattgccattgcgccagacgatatcgctattacgctgcatcataaattgtgccatgccgcgcgccagctactggaacagacattacccgccattaaacacggtaatattctggaaatcgcccagcgcgaaaacgaagccacctgttttggtcgcagaacgccggatgacagtttccttgaatggcataaaccggcatccgtactgcacaacatggtacgtgccgttgccgatccgtggccgggtgccttcagctatgttggcaatcagaaattcaccgtctggagcagccgtgttcatcctcatgccagcaaagcacagccggggagcgtgatttctgttgcgccactgctgattgcctgtggcgatggcgcgctggaaatcgtcaccggacaggcgggcgacggcattactatgcagggcagccaattagcgcagacgctgggcctggtgcaaggtagtcgcttgaatagccagcctgcctgcaccgcccgacgccgtacccgggtactcatcctcggggtgaatggctttattggcaaccatctgacagaacgcctgctgcgcgaagatcattatgaagtttacggtctggatattggcagcgatgcgataagccgttttctgaatcatccgcattttcactttgttgaaggcgatatcagtattcattccgaatggattgagtatcatgtcaaaaaatgtgatgtcgtcttgccgctggtggcgatagccacgccgattgaatatacccgcaacccgctgcgcgtatttgaactcgattttgaagagaatctgcgcattatccgctactgcgtgaagtaccgtaagcgaatcatcttcccgagtactagtgaagtttatgggatgtgtagcgataaatacttcgatgaggaccattctaatttaatcgtcggcccggtgaataaaccacgctggatttatagcgtaagtaaacaattacttgatcgggtgatctgggcctatggcgaaaaagagggtttacagttcaccctcttccgcccgtttaactggatgggaccacgactggataaccttaatgcagcgcgaattggcagctcccgcgctattacgcaactcattctcaatctggtagaaggtagtccgattaagctgattgatggcggaaaacaaaaacgctgctttactgatattcgcgatggtatcgaggcgttataccgcattatcgaaaatgcgggaaatcgctgcgacggtgaaattatcaacattggcaatcctgagaacgaagcgagcattgaggaactgggcgagatgctgctggcgagcttcgaaaaacatccgctgcgccatcatttcccaccgtttgcgggctttcgcgttgtcgaaagtagcagctactacggcaaaggatatcaggacgtagagcatcgtaaaccgagcatccgcaatgcccaccgctgcctggactgggagccgaaaattgatatgcaggaaaccatcgacgaaacgctggatttcttcctgcgcaccgttgatcttacggataaaccaagttgacctaagatcttacggataaaccatcatgaccaaagtaggcttacgcattgatgtcgatacctttcgtggcacccgtgaaggcgtgccgcgtctgctggaaatcttgagtaagcataatattcaggccagcatttttttcagcgtcggcccggacaatatgggccgccatctctggcgactggtgaagccacagtttttgtggaagatgctgcgcagtaacgcggcaagcctttatggctgggatattttactggcaggtacggcctggccaggtaaagagattggtcatgccaatgccgatatcattcgtgaagcggctaaacatcacgaagtcggcctgcacgcctgggatcaccatgcctggcaagcccgtagcggtaactgggatcggcaaacaatgatcgacgatattgcacgcggtcttcgcactctggaagagattatcggtcaaccggtaacctgttctgccgctgcgggctggcgtgccgaccagaaggtgatcgaagcaaaagaagcgttccatttgcgctacaacagcgattgtcgtggggccatgccgttccgtccattgctcgaaagtggaaaccctggcactgcgcaaattccggtgaccttacccacctgggatgaagtgattggtcgggatgtgaaagcagaagattttaacggttggttactcaaccgcatcctgcgagataaaggcacgccggtttataccattcatgcagaagttgaaggctgcgcttatcagcataattttgtggatctcctcaaacgcgcagctcaggaaggcgtgacattttgccctttaagcgaactgttaagtgagacgttgccgctcggacaagttgttcgcggaaatattgccggacgtgaaggctggctgggttgccaacaaattgcgggtagtcgctgatgaaaagcgtacgttaccttatcggcctcttcgcgtttattgcctgctattacctgttaccgatcagcacgcgtctgctctggcaacccgatgaaacgcgttatgcggaaatcagtcgagaaatgctggcatccggcgactggattgtgccccatctgttagggctacgttatttcgaaaaacccattgccggatactggattaacagcattgggcaatggctatttggcgcgaataactttggtgtgcgggcaggcgttatctttgcgaccctgttaactgccgcgctggtgacctggtttactctgcgcttatggcgcgataaacgtctggctctactcgccacagtaatttatctcagtttgtttattgtctatgccatcggcacttatgccgtgctcgatccgtttattgcattctggctggtggcgggaatgtgcagcttctggctggcaatgcaggcacagacgtggaaaggcaaaagcgcaggatttttactgctgggaatcacctgcggcatgggggtgatgaccaaaggttttctcgcccttgccgtgccggtattaagcgtgctgccatgggtagcgacgcaaaaacgctggaaagatctctttatttacggctggctggcggttatcagttgcgtactgacggttctcccttggggactggcgatagcgcagcgggagcctaacttctggcactattttttctgggttgagcatattcaacgctttgcactggatgatgcccaacatagagctccgttctggtactacgtgccggtcatcattgccggtagcctgccgtggctgggattactccccggtgcactgtacacaggctggaaaaaccgcaagcattccgcaaccgtctatttgttgagctggacgataatgccgctgctgtttttctccgtcgctaaaggtaaattgcccacctatattctttcctgctttgcatctctggcaatgctgatggcgcattacgctttgctggcagcaaaaaataatcctctggcgctgcggattaatggctggattaacatcgcttttggcgtcactggcattattgccacatttgtggtctccccgtggggaccaatgaacacgccggtgtggcaaaccttcgagagctataaagtcttttgtgcctggagcatttttagcctatgggcatttttcggctggtacaccttaacaaacgtcgaaaagacctggccttttgccgcgctttgcccgctggggctggcgttgctggtaggatttagtattcctgacagagttatggaaggaaaacatccgcaattttttgtcgagatgacacaagaaagtcttcagccaagccgctatattcttactgatagcgtcggtgttgccgcaggtctggcatggagcctgcaacgcgatgacatcatcatgtatcgccagacaggtgagttgaaatacggccttaattatccggatgcgaaagggagatttgtcagcggtgatgagttcgcaaactggcttaatcaacatcgtcaggaggggattattactctcgtgcttagcgttgaccgcgatgaagatatcaacagtctcgccattccgcccgcagatgccatcgatcgtcaggagcgtctggtgctgattcagtatcgtcccaaatgatctggctaacattagtctttgccagcttgcttagcgttgccgggcagttgtgtcagaaacaggcaacctgctttgtggcgataaacaaacggcgcaaacatatcgtgctgtggctgggactggcgctggcttgtcttggtcttgccatggtgctctggctgctggtcttgcagaacgtaccggtaggcattgcttacccgatgttaagtctgaattttgtctgggtgacgctggctgcagtaaaactgtggcacgaaccggtaagcccgcgtcactggtgtggggtggcgttcattattggcggcattgtgatcctcgggagtacggtgtaatgggcctgatgtggggattattcagcgtcattattgccagtgttgcgcaattaagcctgggttttgcggcgagtcatctgccgccgatgacgcacttatgggattttatcgcggctctgttagcttttggcctggatgcccggatactgttactcgggctgctgggttatctgctttccgttttttgttggtataaaacgcttcataaacttgcgctaagcaaagcctatgccttgctcagtatgagttatgtgctggtatggattgctagtatggtacttcccggctgggaagggacttttagcctgaaagcactactgggagtagcctgtattatgagcgggttgatgctgattttcctgcccacgacaaaacaacgttactgagttttccctgccactttacactgccgttcccactcatcggggctataactgcttgcgctgaggactttcaccgtatgcagcttttcacgattaatacaataaagcgcattctgcaaagggctgagtaaatcccccactttcacggcgaagtcactcttcacttcggcgatcatttttatcgcgccgccagcatcgcagagcataagtacatgtctgttatcttgtttattgcagcagctttttttgaccagccattccattgcattatcctgtttgctaagagttttcacatcaatttacagattaacagataaactctttatcaacggcaatggaatggcagaaatgagaagtgaaacggagggttaattattgctgacgttgcacccactcttttagcgcctgacgactaattttaataccgccgtttttcagctccggcggcagagttagccagcgcaccggttgttgaaaacgggccagcttatctttcacccattcactaagatcaacgctctcgtggtcatactccatcaccgccaccggtcgatgaccaaactccttgtcggcaacggggacgataaacacctgcaaaaccgcaggatgtgcagcaattacgcgctcgacttcttccggctgaataccctctccgccactgaagaatagattgtctaaacgtccgacaatggtcagcttgccattatgcatctcaccgcgatcgcgcgtagcgtaccagccttcgtcattaaccagactaaccagttgcccgttacgccagtaaccttctgccatactggcagcccgcagccacacttcattattaacgattttcacttcccgacccggcagcgggctaccaacgtctgccaggccgtcggcttctttcgcacacaccgtggaggcaaactcggtcagaccatagccgcaaaagcaacgaatcccctgctcgcgcgcctgttccgtcaactcgaccgggatagccgcgccgccaagtaacaccgctttcagggaaacggaactacggttaaccagcaaacgccagagttgtgttggcaccagactagcgtgagtacagcctgccagcatttgctccaatggctgtttatcacgtaccgtcatccgcgcaccagcgtataaccagcgccacataattccctgaccggagacgtgaaacagcggtaaagagagcaaccaatcatcgtgatcgccaaacggaatcaggcttaacacaccttgcgcactggcaagatgggcctgataagtatggacagcggctttcggcaaaccggtagaaccgctggtcaacgtcatactgcacagacgcgtcggctgccacgtagcggcatgtgcgccttcaaccagctgaatgtgcaggctcgttaatgccggaaacgtgttttccccatccggcaccagagcaaattgcagcgtcagattgggcagcaattcttcaagcaacggttgcggcagctgagggttcacgggcaacacccgcgccccgcattgcagtaacgccagccaggcgagcagcgtttgcggcgtattccacgcccgcaacatcacgccgctgccctcaaccaccccctgcaccgcaaatccggaggctaattcatcgacgcgagcacaaagctcgcgccagttgagttgctcgtcattaagacgtaaggcgatggtttctccccgcacttgccgccagtgacgccacggccagtcagagaagatcataacaaccgctccagtgcatcaacttccacgacaggcagcgtgctacccggccagcgacgtacctgctgcgcctgcatcagatccagcgtgtccagccctggaatggtgtccggcgttaaccaggcggcaatccgcgccagttgcgttaagcctaagctgctttcaatggaagaactgatcaccgccgtcagccccagcgcgtgcgccgcctgtacctgctcgcgtactttttccagactgcccgtgagcgtgggtttgataactaccgcgcgcacgccctcttcagccacaaaggcaaaatccggctcgcgcaggctttcatcccaggcaatggcaatgccggtttcacgggcaaacgctcggctatcatcgcgggttttgcacggctcttcgagaaacgcgatgcggtcgcgataatccgggttaacgtatttggcaaactgctgacctttcagcggtgtccaggcgcgatttgcgtcaagacgcaaatgcagatccggaattgcctccagcaacagattcaccaccatgccgtcgcgcaccgcttcgtacaatcccactttgaccttcgccactttctcgcctggcatatctgcaagtttgaggatcagatcgtccggatcgccattacacagcggtgccgcacggtagttggctgcttgcggcaacgtatctgtcagttctgccaatgcacagcttacgccaaaggccacggaaggcatctgcggtagctcgcaatcgcctgccagccagttatttacccaggcaagcagcacactttgcgcctcttcccaggtttcctgactgaagcccggcagtggggagatctccccccacccttcgcgctcgccttcacgcaggcaaacatacagcccgtcgcgggtttttaaccgcctgtcgcgcagaaccacccccgcgtccatggggatctgccagcggtatacctgcgcgctacgcattacggattccgtttgaatttgctgaagtcaggctgacgtttctggttgaaggcgttgcgaccttcctgaccttcttccgtcatgtagaacagcatggtggcgttgcccgccagctcctgcagccccgcctgcccgtcacagtcggcgttcagtgcagctttcaggcagcgcagcgccatcgggctgttttgcagcatttcgcggcaccaacggacggtttctttttccagatccgccagcggtaccacggtgttcacaaggcccatatccagcgcctgttttgcgtcgtactgacggcacaggaaccagatttcacgcgcttttttctgcccgacgatgcgagccatgtaggaagcgccccagccgccgtcgaaggaaccgactttcgggccagtctgaccgaagatggcattatctgccgcgatagtcaggtcgcacatcatgtgcagaacgtgaccgccgccgatggagtagccagccaccatcgcgacaaccggtttcggacaggtacggatctgacgctggaagtccagcacattcaggtgatgtacgccggaatcatctttatagccgccgtaatcaccacgcactttctggtcaccaccggagcagaacgctttatcgcctgcaccagtcagaatgatcacgccgatgttgtcgtcataacgcgcatctgccagcgcctggatcatctcttttaccgtcagaggacggaaggcattgcgcacctgcggacgattaatggtgatttttgcgataccgtcggtggatttttcataacgaatgtcctcgaaaccttcggagcagtcgtgccattcaaccggtgcgtaaagcattgcttcatcaggataaatcatattgtgtcctttagtcagaaacgcaagatctgcgccagacttgcgattacgccagcgggattttcccgatgcgcgttatgtccggcgcgaggaatgacatggcagtcggcagccagttccgccgccagggcgcggaatttgctgtcacgttcaccacataaataataaaacgcaaatgtgcgggcgctaaggttagcacgtaaatcaggctggacggcgagagaagtcgcctccagcatggcggcaagcgttgcgccattattgttgctgcgcagcgccaccagctcccggcgttgatcgtcattgagactggcaaaaacaggctgttgataccagtcggcaaataccgccgttaacggttctgtgagaaaacgctgcacccattggcgatcggaacgctgacgttccgcacgttgttcagcattttgcagccccggatgcccgccttcgacaataaccccacaaagccccgccagcccctggcaagccgccatcatcgccacccgtccaccaaggctgtaccccaccagccagaagtcaaggatgttgtaactaaccaaggttttacgcagtaagtcggtgacatcatcaaatccatcgacgctaatcgccgcgctaccaccgtgacctgggagatcaacatacaaccgactgtagtcggcaaacgcctcgcccacttcttgccattcgtggcaatcgccggaaaaaccgtgcaaaaacaccagccagggtaaacctggttttccgtgttttgcctgcgcgtgcaggatcataaatggcttacctgcgccagaagttgctggagcgtttgcgcaccatcggtgtcgttaaccaccatttcaatcaccgtggtggttggcgtgcgccaggcgtcggcaaatgccgtttcaagttcctgccagttttgcggacgatgatatttcagctcgaacatcgcggcggcgtgctcaaaatggacgttttgcggcatcagatagaaacgctcacgctcgctttgcggcgttggcaacaggctgaaaatttgcccgccgttgttgttcaccacaattaataccagcggcgcagaaacctgacgcaataacgccagcgcgttgagatcgtaaagtgcggagagatcgcccacaatcgccagcgtcggtttgccgcttgcccgctgaacgccggcggcggtgctaagcagcccgtcgataccgctggccccacggttgctgtacaccgggtaacctgccggaagttggctaagcgcatcaatcagacgtaccaccaggctgttaccaacaaacaattgcccctgttcaggcagatagtcgcagatgcgatgcgccagttgcgcttcgccaaacgcatcacggcgggcaataaccgcctgcattgcctgttccgccaggcgcgggatttcaacgcaccagggctggcgtttttctgccggatgcagctccagccagtcggcaatattggcaattaagcgacgtccgcgatggtgtgccggatcaagtcgcccttcaatgtcatcaacaatccagtactcttctggttcacagcttgcctgccattgcaggagccgtttccccgtcaggctgcttcccagttgcaccacaatttgcgcctgctgcagctcgctggtcgctttggcattgcctaaccaaagatcggcacacggcagcggctgcccggtttgactcagcacatcgccaatcagcggccagccaagagtttgcgcccacagggcaacttttttgccctcttccgcactcatgcgcccggcaaccaccacgccgcgcttttgtcgccagaagaaccagtcgcgctgtttttcactttccagacgaggcgcttcacgcagccacggtttgtcgtcctgccaccagtcacccagacgctgttgccagctaagcccggtatcgtccatttcgccatacagcggttcagcaaacgggcagttgatatggactccccccgcatgaagcgtaccgagagcgtggtcgatggtagaaaccagccaacgtgcggggatatcctgggtcgggcgcggcaaactaatactgtgcgtggggtgagaggcgaacattcccggctggcgaattgcctgattcgcgccgcagtcaattagctccggcgggcgatcggcggttaagagaatcagtttttctccggttaacccggcttcaatcagtgccggatagagatttgccaccgccgtgccggaggtcacaatcaccgccaccggctgcttgctgactttcgccagccccagcgccagatgccccaacccacgctcatcgaaatgggtgtggtgaatgaatgcggaattctccgccgccgctaacgttaacggtgtagaacggctgcctggggcgatacagatgtgtctgacgccgtgacgcgttaatgcttccagaatgaccgccgcccagcgtcggttaaatgcgcttacactcatgagtttgtccggtatcaatattgcggctaagtataaggagctacaaaaatagattattgatatgaatcggtaatgatgcgactcattattattccatttgtaataaagtacgcagccctgccgctttgttgtcgatttcctgccactcttgctcggggtcggaaccacggacaatgcccgcgccagcatataatcgcacgacattgccgctaatttttgcactgcgcagggaaacgcagaattcgctttgttgtaaactgagatagcccgcagaaccggcgtaccattctcgggtgaacggttcgtgacgggcgataaactgtcgcgccagatcgcgcggtaagccagcaactgctgccgttggctgcaactgatgtaaacagatcacatcatccgctttgttgagactagtccagatacagcggcgaagatgctgcactttacgcagacgcagtacctgcggcggtaaaacatccagcgtctgggtatcggcctgtaatcgttgacagatatcttccaccaccagcatgttctcgcgctggtttttatcatccgccatcagccactctcctaactgctgcgcctgcttatcatcaggattatttgctactgttcccgccagcgcttcagtacgcagcgctttgtcacgccgccgccataaccgttccggactagagccaagaaaagcattttcgccatcaaaggccatgtaaaaatggtagcaattcagattcagtcgacgactggcagccatcatcgccgccgcgttgaccggacttgcgaaatgcaggtcagttgcccgagcgagcaccactttgtcgagctcaccttcggcgatggttttcgttgccagttcgattaattgcgtccagcccgttttgtccggccagtgttgttctcgcgtggtggttaaatgtaacccaggcaagggcttgatactcaccagtgtggcgataaattcttttgcctgaatcgcatcgtgctgaagggagctttcgctgaatagcgtcagccgcagcgtggctttaccgccacagcgtcgccattccaggcggggtaaaagtaaattgccctggctcgggtcaaaagcattcagcccccaaatgcgtaagtcggcgtgttccgggtgctggcgaagaaaacgttgtgcctggtccaagctcgtaaaacgggtaatcgcgcccaggacgacagcttcttcatcaccattacgttgttgccagtagaattgcgggtatgtttgctgactggccagccagctcaaggcatcaaaagcgtctttgagagggaaaggaatatcgataacccgaatgccgggtgtcgccggaatctcttggctcaaatggcgcagtagattttccagcgccgtagtaagactttgcacgcggacctctccctgttaaaagcctcacattatacggggtactacaaaaaaaatgcagtaccccggtgtagggaggttttaacggcgtgccagcaacagtcctagtaccagcccaacggccgcgcccacaccaattccttgccagggtttttcgtggacgtagtcatcagcacgataaactgcctgcttcgcccgatagtaataactgtcactagcctggctaacccgttttttcacatcatccagcgctttttctgcacgcgctttcagctcaacatatttctgatcggcgggatcgccagaggagcggagcacctcttccagtgtttcactaagcagcgtcaggtcgtcatcgatacgtgtatcaccaaactgattagacattctcgttctccatttgcgtaaaacctgtcactaactatagacaagggttgttgattacgcctgaattacctcgcgtgccatcccaatgtgtgggataccatcttcttcatagacctccgtcacagggataaaaccgaaactctggtagaagttttgcagatgcgcctgcgccccgaggtaaacaggcttatcaggccagtgatgcgtacatgtttcgagtgttttactcatcagctgctgccccactttttcgccacgcaacgcttcactgacaatcacccgacctataacgaccggctcaagatcatcatcacttttcagaatcctcgcatacgccaccagttcatcatttttccaaccgagaatatggcgattatcccccgtcaaatcatcaccatcgatatcctgataagggcaattctgctcgacaacaaacaccgcgcaacgcagttgtaataaggcataaagctgggaaacgcttaattcagagtgatgcagatcttgccattcaatcataatgctctccttttagatgtatgccttatactagccggaatattttttgaaacgtgatgaactcatggaattaatttttttaggtactagtgccggtgtgccaacccgcacgcgcaatgtcacggcaatattgcttaacctgcaacatccgacccagagcggactttggttgtttgactgcggtgaaggcacccagcatcagctactgcataccgcctttaaccctggaaaactggacaagatttttatcagtcaccttcatggcgatcatctttttggtttacccggcttgctgtgcagtcgttctatgagtggcattatccaacccttaacgatttatggtccgcaaggtatccgtgaatttgtggaaaccgcgctgcggattagcggcagttggaccgattatccgctggaaattgtcgaaattggcgctggcgaaattctcgatgatggcctgcgcaaagtaaccgcttatccgctggaacacccactggaatgttatggctatcgtattgaagaacatgataaaccgggtgcattaaatgcccaggcattaaaagctgctggcgtgccgcctggcccactgtttcaggaattaaaagcgggcaaaacaatcacgctggaagatggaaggcagattaacggcgcagattacttagctgctccagtgccaggtaaagcgctcgctattttcggcgataccggcccctgcgatgccgcacttgacctggctaaaggtgtcgatgtcatggtgcacgaagcgacgctggatataaccatggaagccaaagccaatagtcgcggccatagctctacacgccaggctgcgacactagcccgtgaggctggagtcggcaagctaatcattacccacgtcagcagccgctatgatgacaaaggttgtcagcacctgttacgtgaatgcaggagtattttcccggcgactgaactggcgaatgatttcaccgtgtttaacgtttaactctgcttattattaaaaacagggcgaaacttgccctgttatcgcaacccgcgctacatatatccacccacacaggcatattgagcgatttttgatatttattcatctccttacgcactatattcagagcaataagttgcctcttttcatcttgattcagcacaacctttgcaactaaaaggagcccatgatggttacagttgtcagcaattattgtcaattatctcaaacgcaactcagtcagacatttgcagaaaaatttactgtgaccgaggaattactgcagtctttaaaaaaaacagcgttatccggagatgaagaaagcattgagttactgcataatattgcgttaggttatgataaatttgggaaagaagctgaagatattctttaccatattgttagaaccccaacaaatgagaccctaagcattatccgacttatcaaaaatgcttgtttaaaattatataatctggcacatatcgcaaccaactcccccctcaaaagtcatgatagtgatgatctcctgttcaaaaaactattctcccctagcaaattaatgacaattatcggtgatgaaattcctcttatatctgaaaaacagagccttagtaaggtgcttttaaatgatgagaataatgaactgagtgatggtacaaacttctgggataaaaatcgtcaattaaccacagatgaaatagcttgctatcttcagaagatcgccgctaatgcaaaaaatactcaagtcaattatcctactggtctctacgtcccctactccaccagaactcacctggaagacgctctcaatgaaaatattaagagcgatccaagttggccgaatgaagtccagttattccccataaatactggcggacactggatattagttagcctacagaaaatagtaaataaaaaaaataataaactacaaataaaatgcgtcatattcaacagtttgcgtgcactaggctatgataaagaaaatagtcttaagcgtgtcattaatagttttaattctgaactcatgggagaaatgagcaataataatataaaagttcatttaaatgaaccagagataatatttttacatgccgatcttcagcaatacttaagccaaagttgcggtgcatttgtgtgcatggcagcccaggaagtgattgaacaaagggaaagcaattctgacagcgccccctatacgttattaaaaaaccatgctgacagatttaaaaaatatagtgcagaagagcagtacgaaattgattttcaacatcgactggcaaacagaaattgttatttagataaatatggcgatgcaaatatcaatcattattatagaaacttagaaataaaacacagtcaacccaaaaatagagcatccggcaaaagagtgagttaacatcattgttaattaattcgaccagtcagcaaatatgctgactggtcgaacatagtttgctaaacagtcatcactgactgatgtcagtcacaccatccgccagttcaatcaggcgaataaattccgccctgtaaccctgtggatcttccccttttgcctgctgagcccactgtttgatctgctgccaggaggtattgttcaggtattcagaaccgcgtaacttttgcccatatgcagctactgctgcgcgaaaacgcatatcttcagagggcgcgtttattgttggccccagcgggaattcaactaactgactttcttttccctgcgggtatttccagcgaatttttaaccaggccagttctttcgttttgtcgcttttcgctaatttgttatccggggcatagcgtaacttatcaatacttgctttttgcccgttcagcgttaattcgaataacaacgttatatgtttgcctgcgcctatatcccctgcatcaacgttgtcgttattaaaatgttccacccgaagttggcgcttttcataaccaatctgacggtattccgttacccacgcggggttaaactcaatttgcgctttgacatcttttgctacggtaatcaacatctgccgcatttcactattcaatactttctgcgcttcagagagggtatcaatgtagctgtagttgccgttaccaacatcggcaattcgcaccatcattgcctcgttgtaattgctattccccacgccaaacgtgctcagagtaacaccagactcccgctgttttttgaccatactttcaatgctttttggatcgtcaatgccaacgttaaagtcaccgtcagtggctaataaaatgcgattgatgccgcccttaataaaccccttcgtcgcctgctgataagccagttccagcccggcaccgccattggtactgccttcggcatccaggctatcaattgcggcattaatttccgccttatgactcccggagatagaaggcaatgcaatacgggagtcgccagcgtaggtcacgatggcaatgttatcctgctcacgaagttctttgaccaataatttcaagctagactggataagtggcaaacgttcatcagaaatcatactaccagaagtgtcgataagaaagaccagattagaagctggtaactcttcacttttgcgatctttcgccaggatatcaactttcagcaatgttcgctgttcattccatggtgcaggtgccaattcgtagcgcatagcgaaaggtattggcttagaggccggaatagattgtttgtctttgatatcccaatcagacgggaaataattgactatctcctccacccgcacagcgtctggcggaggtaacagcccttgattgaggaaacgccttacattcgcataactgccagtgtcaacgtcaagactaaacgtcgccaacggattttgcgctacctgcttaaccggattatcatcgaactgctggtagcgagcggttcctggatttgcgatatgtgtagcttttgctttagccgctcttgcaaatgttggcgcttcctgcaatcgcccctgtaaagcctgtttgtcactatattgttgcacttcttgctgggccaaggctttcgcggcggcggcgctttgctcagcctcttttattgcagcttgctgcgcggcaagcacttgctgctctgtgggagtactgggttgttgttgctgactttccttattctcaggttgcggcccacatccactcaaaatcaaactactcataagcaacatgattatatttttatttcgcatataaaatccttttaaataaactcaggcaccagacataaaatatactctttgtataatcctgctaatcttaataaaatacaatatcgaaacccatagcaaataatgattcaacaacgcaacccattaataatttgcatatgaaaaaaataatctttgcttttattatattatttgtgtttttactccctatgattattttttaccaaccctgggtcaatgcattaccgagtacgccccgacacgcaagtcctgagcaattagaaaaaacagttcgttatcttacacaaactgtgcatccacgtagtgccgacaatattgataatctgaataggtccgcagaatatataaaagaggtctttgtcagtagcggtgccagagttaccagccaggacgtccccattacgggtggcccctacaaaaacattgttgctgattatggtcctgccgatggaccgctgattattattggtgcgcattatgactctgccagcagttatgaaaacgatcaattgacctatacgccgggcgcggatgataacgccagcggtgtggcaggattactcgaactggcacgtttgttacatcagcaagtaccgaaaacaggcgtgcagctggtcgcctatgcgagcgaagaaccgcccttctttcgtagcgatgaaatggggagcgcggtgcatgcagctagccttgagcgtccagtgaaattaatgatagcactggagatgattggctattacgactctgcgcctggaagccagaattacccttacccggcaatgtcctggctttatcccgatcggggagactttattgccgtggtcggcagaatacaggatatcaacgccgttcgtcaggtaaaagcggcattgttgagttctcaggatttatctgtttattctatgaataccccagggtttattcccggtattgatttctctgaccacctgaattattggcaacacgatattcccgccataatgattactgacaccgctttttatcgtaataaacaataccacttgcccggtgataccgcagacagattgaattatcagaaaatggctcaggtagtggatggtgttataactttgttatacaacagtaaataataaaaatttctcgaggcgggtccagaaaaagcgacatgcacattttattttccctcatctgttttaagatgcgaaacatgaaattcaacggaggaaaaataaatgggaatgattggctattttgcagaaattgacagtgaaaagattaaccaactgcttgagtctactgaaaaacctttgatggataatatacatgacacgcttagtggattacgccgactggatattgataaacgctgggattttttacactttgggctgacaggcacctctgcttttgatcccgcgaagaatgatccgctgagtcgtgccgtgcttggtgaacacagcctcgaagatggcatagatggcttccttggattgacctggaatcaggagttagccgcgacaatcgaccgactggaaagtctggatcgaaatgaactgcgtaaacagttttccattaagcgactcaatgaaatggagatttatccgggagtgacctttagtgaagagttagaggggcaactctttgccagcatcatgcttgatatggaaaagctgattagcgcgtatcgacgtatgctgcgacaagggaatcatgcgctgacggttattgttgggtgatatagcttgatgcctgggggagaaagacccattagttaagatttacgccaggatcatcttgaaaaaatctttaaccatggtccggtttttatccccttgtataaatattactaaatgcttgcttagtcgcattgttaaatgcaataccgtatattcggtatgtaacagcgatatcctctgtgctggcaacgatctgtcatgcttgatgaaaacggaattgaacctgtcattaccaggtagataaaaagcctgttcaattttgggattattttttataactcgtgtctgttatggcgacacgggaaaacatcaatattgtccttcacaaattgcagtaatatagaatcaacctctcttgcaagttggtcacaatgtattataagcattttgaatatgtcatcctctgtaatctcgtgaaaattttcggccttgtcttttagctcatcatatcggattcttgcagtaaccattttttgggcgagttctaataaccccaaagcttgcaattgctggtgagtatgatcactttcaaaaaatatcccacactccattccttcccaaccaacatattcatgccattcataaaccagcataaatgtttgtaaaactggcggtaataattggatatctgcaaaaccaaaccaaaacttacgcttgagatcccactcatattcaatcgccaatgctatattgtttaaggcatctccggcatccttatttttacgcaaaatcaattccgtcagtgtatagcgttgttcatcaatacgccgaagagcttctgcaatatcatagtttgtagccaacaaaacattctctgcttcctgatgagtgacgtctgcttttgccgtcaatatattgatttggtcaatatgaaacaacttgatggcttcatcaacatcaccgccagtcctctctaacaaacgtctggcaacctggataccgacaggtacgttcttccgaagtttacgaatttcacttaaccattccatgtcaaacccctttaaatatttatgatattaaatataacaacgtctggataacgacccggcctgactgaatatctcacgttttcctgcttaacattcatgttatgatgctcttgaaactaataatacgtatggaattgtcactatttatctgctaatgaatagtaacaatgtcattcgtttgatgaatatattatttcagggaataattatgacacctttagaacgcattacccaacttgttaatatcaatggtgatgttaataatcctgatactcctcgtccattgttatctcttgaggatttttttattgacaataatatccatggtagtatatgttgcaatgtgattccagaacaatctccgcaagctatctatcaccattttctgaaaatacgtgagcgtaacaatgttagtgatgttttggtagaaattacgatgttcgatgacccagactggccctttagtgaaagtattttagttatcaccactgctagtccagaagaagttcagagctggtttgtagaagaaattgcccctgatgagtgctgggaaggatggagtgaagatacggagcatggatgggttgaagtccctgtgggtatgcatccggttacttgttggtgggattaaaacatttatataaacagataagcggatgtttacataaatttttatgtgaaggaacatgatgaaacttattcctcgcagtagtgatattagtcctggcattgatggaatttgcccggggccttttcctccgaacggatttaccgtacttacagatgcagcatatggtaacggagactgtttcggtttgtactggcctattggtcaggagcataaactacctatagtgtgcgaaacgtaccatgacgaatggcgaatcgtacctgccttttccagcattaagaagttcgaagaatggctggaagtgaatgatgatgatccccatgaaaatggcatcagcatcgaagatcaagactttgcagcaaatctcttccgtgttgctcggaaatgtcttagtacgggaaggcttgatgacgcactgccactgttacagcgagcaacagaacaattgcctgaagtcagcgaatattggttagcactggcaatccagtatcgccgatgtaaaaaaacagaagctgcagcacaggctgcgcttaatgcttatcttggcaattgggcatttggtgttcctgacaataaagtcattcatttgctgagtcaggccgcagatgtcccgaatttccaggatgatcctgtgattcagtgcattaaagaacaaggattagatcttagctttggaggaacaaaggaaaataataattaccccttgatgcagatgtgtgttgatacttattttgcgcagagaaaaccgcttcaggcattaaccctgttacataattatgcctggataatgtccagtgaaacgactgcatttcaggaacgctatgattttaatatcgatgaatggcgggcaaaattcaggcagttatgtttagagtattttggcgatagtcgtacacagttcacttaacgctctgcgtctatctactatcccttctttttcagaaaaaccgccgagcatgtcggcggctttctgacttacaaagtaacagattacatcagcggcattgccaaacgcacaatgctaatcagcggttgtggccatacacccagcaccagtaccaacagtgcagagatcagcacaacgataccgcccgcgctgtactgccagttacttggtgcatcgcgacccggttgttccggggcgtgaagatacaggctcaccgccacgcgcaggtagtagtagaggccgattgcgctaccgacaaccacggcacccaccagccaccacaagtgtgcctggacaccgaccgccagcacgtagaacttaccgataaagcccagcgtcatcgggataccggccagagacagcatcatcaccgtcatcactgccgcgaggatcggacgatgccagaacagaccgcggtaagagaacagggaatcagcatccgggccacgatacgggctggacatcaggctgaccacgccgaacgcgccgaggctgctgaacagataaccggccaggtaaacccctaccgcttccatgctcatctcgccggtttgcagcgcaatcagcgctaccagcagatagccgaggtgagagatagaactgtaaccgagcagacgtttgatattggtctggctcagcgccatcaggttaccgaagatgatggaggcaaaggcgataatcgccagcaccacgcgaatcgcttcgctgtcacccaccggtgcgtagaggaacagacgcatcaccacaccgaagatagcgattttgctcgccgtcgccaggaaagtggaaaccggcgcaggcgcgccctggtatacgtctggcgtccacaggtggaacggcaccagagagagtttgaagccgaggccaacaatcatcaggccgaaacctgccagcaacagcggctcgttgagcataccgtcgccaaggtttttacccaacgcgacaaagctcaggtcgccagactgcgcatacaccagcgccataccaaacagcaggaaagaagacgctgcggcagaaaggatggtgtatttgatactggcttccagactacgtttctggcggaaagcgtaaccgaccaggccaaacagcggcaaagagatcagttcgataccgaggaacagagacgccagatggttggcattcgccagcaggatcccgcccagcgcggcaattaacaccaacaggtagaactcatccttgttgtcgttatagccttcaagccacgggtaggcgaaagtacaggtggcgaggctcgccaacaataccagcccggtgtaaagcatggcgaaaccatcaacgcgcatcagcggcgtaacgtccatagcgcccgcctggccaacaaaccagagcgaaaccagcgccgcgttaagcccaataaccgagagcgtagcgttgaggaaatgattgcgtcgccacgcaatggagagcatcacaaccaccaccgtcaagccgacgatcagcaacggtagcagtgcgatcaggttttgtggagttattgtcatggcgatttacggccttgtagtagtaacggaattaacaaaccactgctggatattgccaatcgcggagtggctggtatccagaatcggctgcggatagaagcccagcagtaccagcagcaccaccagcaacaggatcataaacagctcacgcaggctcatccctggcagttcctggctggcaatctggcttttcgctttaccgaagtaagcgcgatgtaacatcgccaggctataaacagatgcaaagaccagcccaaaggtagagataacggtaatcaccggtacaacctggaagctgccgaacagaatcataaattcgccgacgaagttaccggtgccaggcatcccaagcgttgccaccgcaaagaacaggctcagtgctggcagccatttcatcttgctccacagaccgcccatcatgcgcatgtcgcgggtatggatacgttcataaagctgaccacaaagaataaacagacccgccgcgctcaaaccgtgcgcaatcatctggattaccgcgccctggtaggccaactggctgccggtgtagatagcaatcagcacgaagcccatgtgggaaacgctggtgtaggcgatcagacgtttgatatcggtctgggcgaaggccatccacgcaccgtagaagatgccgataacacccagccacatagcaattggcgcgaactctgcgctcgcgttcgggaacagcggcagggagaaacgcagcaaaccgtaagcggcagttttcagcaagatccccgcgaggtcaacggaaccggcggtcggagcctgggagtgcgcatccggcagccagccatgcagcggaaccaccggcattttgactgcgaaggcgatgaagaagcccagcattaacaggtattccacaccactggacattggcgtattcagcagctcttcatagttgaaggtccagacgccggtcgcattgtagtgaacaaaaaccagcgccaggatggcaatcaacatcaccaggccactcgcctgggtgtaaatgaagaacttggttgccgccgtgatacgcgttttaccgtcagaggctttatgcccccacagtgcgatcaggaagtacatcggcaccagcatcatttcccagaagaagaagaacaggaacatgtcgatggcaaggaacacgccgataacgccgcccaggatccacatcaggttgaggtggaagaagccctgatatttttcgatctctttccagctacatagtaccgccagcacaccgagcagaccggtcagcacgaccatcagcaggctcagcccgtcaatggcgagatgaatagagataccaaaacgcgggatccacggcatgtcgaattcagactgccactgcggaattccggcggattgcgtcagactataaccgccctgcaaccacagttgcaggctcagcgccagcgtcaatcccatggtgatcagcgcgatccagcgtggcaccttgacgccaaagcgttcggtctgccagcacaggaagccgccaataaagggaattaatattagccagggtagtaacatggcgatctttattccttgtaaaagtcccgtcaggaccggattttcaacgaattctcacgacagaaaattctcttcggactgggggtagtgtcggatgcaccgcgaaggcggcttatccgacctacgttcttatatgcccaggggcaatcccacaatccttaactcaacgcagtaccatcaacagtgccagcaccacgaccgcaccgatgctcatggatgccacataccagcgcagatagccgttctcacttaacagcagacctttacctgcaaagcgggaaaggacagccgggatgttcatcatactgttcagcggatcgcgtttcagcaaccaggcaatacccaggaacggcttgacgaacactttgtcatacagccagtcaaatccccaggcgttgtaccaccaggtgcccagcagacggcccggcgcactgttggcgatggaggtcaccagagtacgtttacccagccacagccaggctgccagcagaatgccgaccaccgcgaccacgccagaggtaatttccagggtcaacatgctgccgtgcgccagttccgtcgtttgcggaagcacgccctgcagcggcggtacaatcagtgcgccaacgaaggtggaaaggatcagcagcacaatcagcggcaggctgtgagttacccctttcacggcgtgagcgtgaatttgttcttttccgtggaagacgatgaaaatcatacggaaggtgtagaggctggtcataaacgcaccgaccagacctgccaccatcagattgatatgaccattcgccatcgcacccgcgaggatctcatccttactgaagaagcccgcagtgaccagcggtagtgcgctcagtgctgcgccgcccaccaggaagcagagataaaccagcggaatagatttacgcagaccgcccatcttgaagatgttctgttcgtgatggcaggccagaatgacggaaccggatgccaggaacagcagcgctttaaagaacgcgtgggtcatcaagtggaaaatcgccgcatcccatgcctgcacgccaagcgcgaggaacatgtagccaatctggctcatggtagagtaagcgagaacacgtttgatgtcggtctgtaccagcgcggcaaaaccggccagcagcagcgtaaccgccccgacaatacccaccagatgcagaacttccggcgtcatcaggaacaggccgtgggtacgggcgatcaggtagacacccgcggttaccatggttgcggcgtggatcagcgcggagacaggcgtcgggcccgccatcgcgtcggcaagccatgtctgcaacggcaactgcgcagatttaccgaccgcaccgcccagcagcatcagcgtcgcccacatcagcatgttattgccgtcagcaaagtgcgctggtgccagttccaccatttcgcggaagttcagggtgcccagttcgttgtaaagaatgaacagtgcgaaagcgaggaacacgtcacccacacgggtcacgacgaacgctttcattgccgctgcgccattcttcggatcggtgtaatagaacccgatcagcagataggagcacaggcccacgccttcccagccgaggtacatcagcagcaggttgtcggcaagcaccagaaccaccatgctggcgatgaacaggttggtgtaagcgaagaagcgagagtagccctcttcaccgcgcatataccaggaggcgtacatgtgaataaggaaacccacaccagtgaccacgctgagcatggtcaggctcaggccgtccagcaccaggttaaaaccgatgttaaagtcgcctacgctcatccacgtccacagcggctggctgtatgtctgctcgccgttagcgaagaaatcaacgccgataaaggcggttaccagcgccgccaggcccacagagcctacgccgacgatcgcgctgacgttttcagaccagcgcccacgggagaatgccagcaggacgaagccaatcaatggcaaaataatggttaaggcaagcatgttcatccgcgcatctcacttacactatcgatgttcaggttctggcgacgacggtgaagttgcagcagcagcgcaaggccgatactcgcttctgccgccgcgaggctgatggcgagaatgtacatcacctgaccgtcggtctggccccagtagcttccggcgaccacgaaggccagcgcggaggcgttaatcatgatttccagaccaatcaacataaacagcagattgcgacggataaccagaccggttaagccaagaacgaataagattgccgcgaggatcagtccatgttgtaaggggatcatgcgtgctcctccgtttttcttttcgcgctgtcgtctttacgattgctcagcacttcacccgcacgctcttcacgaccgacgtggaaggccacaaccagacctgcgagcagcagcatagaagccagttccaccgccagtacgtaaggcccgaacagcgtaatacccactgctttagcactgattggcgtaccgtcgataccctgatcgttaacaccgaggatggcgtaaacaatcaccaccagcatgatggcgctcaaaattgccggaccaatccacacctgcggtttcagccactggcgttcctgttcgatttcactaccgcccaggttgagcatcatcaccacgaacacgaacagcaccataatggcacccgcgtagacgataatttccagcgcaccggcgaagtaagcgcccagactgaagaacaccccggaaatcgccagcaggctaataatcaggtacagcagtgcgtgtaccggattggtatgggtgatcactcgcaaggtcgcaagtatggctatcaggccacagatataaaaagcgaactccattgcccctctccttacggtaacaggctcttgacgtcgataggcttggcttcgttctctgcttcgcccttatctttgccgtcgattgccatacctgccatccggtagaagttatattccgggtatttgcccggaccggagatcagcagatcctctttctcgtaaaccagatcctggcgcttgtattcccccatttcgaaatccggggttaactgaatcgccgtggtcggacaggcttcttcgcacagaccacagaaaatgcagcgactgaagttgatgcggaaaaattccgggtaccagcgaccgtctttggtttctgctttttgcaggctgatacagccgaccgggcaggctaccgcgcagaggttacaggctacgcaacgctcttcgccgtccgggtcgcgggtcagaacgatacgaccacgataacggggcggcagatagaccggctcttccgggtacattcgcgtttcgcgtttggcgaacgcgtgcaggccgatcatccagatactacgaacctgggtgccgaaacctactaacaattcttttaaggtcatggtcttattgccccttattgcgcctgccagagaatgacagccgccgttaccagcaagttgatcagcgtcagcggcaggcagattttccagccgaaggacattacctggtcataacgcggacgcggtaagctcgcacgaatcaaaatgaacatcatcataaagaacgcggttttcagcgcgaaccagatgaatggcggtaacaacgggccttgccagccaccgaagaacagcgtcaccatcaatgcagagatggtcacaatcccgatgtactcacccacgaagaacagaccgaacttcataccggaatattcaatgtggtaaccatccgccagttcctgctcggcttccggctggtcaaacgggtgacggtgacataccgccacgcccgcgatggcaaaggtaataaaaccaaagaattgcgggataacgttccacacatgcgcctggctgttgacgatgtcggtcatgttgaaactaccggcctgcgccaccacgcccatcaaggaaagcccgaggaacacttcgtagctcagggtctgcgcagaagcacgcatcgcacccagcaagctgtatttgttgttactactccagcccgcaaacagcaccgcgtaaaccgccagacctgccatcatcaggaagaacaaaatcccgatgttcaggtcggcaaccacccaacccggactgactggcacaatcgcaaaggccagcagcaggctggtaaaggcaatcatcggtgccagggtaaagatgacgcgatcgctgaatttcgggatccagtcttctttaaagaacattttgatcatgtccgcaaccagctggaggctaccgccccagccaacacggttaggtccgtaacggttctggaacagacccagcaggcgacgttcgccaaagctcatgaatgccccgcaggtgacaaccaccagcaggatcaccaccgctttgaggatggtcagcaggatctcaatcagttccggacttatccaactcattgttgtgcctccttgagatcctcaagatgcgcgccagccagcaccggagcaatgccggacatacccatcggcaagcccacctgccctgccgtcagtccttcggcgatttcaaccggcagcgtgaccgtgttgccatcgtaactaaaggagacgcgtgtacctgcgttcacacccaacttcgcggcatccgctgggttgagtttgatgtacggctgcggcatacggctctggaagaccggagcacgctgactcaattcatcgctgccaaacaggtggtaatacggcgcgatacgccatttcccgtcctgcggctggaagcgtgccggtacgctggtgaagtaatccagaccattttcgctggtttcaaacagacgcacgcccggatcgccaaagcgcagtttgccgcccacttcgtcctggaatttgttccacgcctgcggggagttccagcccggcgcccaggcaaacggcacttggctacggtgcgcagtcggctggttgttaccttccatgctgaaggtgaacatggtgtcaatatcctgcggctgacgcggctcatgaacgctgatattggcgcgcatggcggtacgaccgctgtaacggtgcggttcacgggccagtttctgcccacgaatacggaatgtcgcatccggcgcagcatctttgatacctgccagttccgggattttcgccacaacagcgtcaatcacatggtcgagctgcgtccagtccacttcacggctcagcagggtgctgtgcaggctgtgtaaccagcgccagctttccagcatgacagttttgctgtcgtaataagcaggatcgtaaacctggaagaaacgttgggcgcggccttcgttgttgatcaccgtaccgtcgctttcagcaaagctggcagcagaaagtaccagatgggcgttttccataatcgctgtgcgttgatgatcaaccaccatcaccagcggtgctttagccagcgcagcattcacgcggatagcagaagcgtgacgatgcagatcgttttccaacaccaccaccgcgtcggcgcgtccggtttccagttcggttaacgcttcttcaaggctaccgccacccataatgcccagccccatgctgttgacggaacgggcaatcatggtgataccgacgtcagcgccgcgacctttcagggctttcgcgacgttagccgccgcctgaatcacctctaagctaccggcgttcgtcccggagataatcaacggtttcttcgcacctgccagtgcctgcacgatgacgtcgattttgctttgcagctcaggttcgataccgtcaaccgctggtgcagagttatccagcgcatgggcgatggcaaaacctaaacgcgcctgatcttcaaccggtgcgcggtaagtccacgccgcgatatcatccagacgggtgtcatcaacgttggtaacaaacagcggatgcttcgcacgttgaccgatgttgaggattgccgcaatctgccagtcagccactttctgtgctgccgccatttcgcgcgctttacctttcacagcctgacgcactgccagcgcgacgcgcgcgccggtctgggtaacgtcttcgcccagcaccagtaccgcatcgtaagattcgatttcgcgcagagccggagtataaatgccgccttcacgcagcactttcagcgccagttgcagacgttcctgctcaccgtgagcgataccggtgtagaagttttcttcgcccaccagttcacgcagcgcaaagttgctttccacgctggcacgcggagaaccaataccgatcactttcttgctctgacgcagaatatctgccgcgccctgcattgcctgttcggcgttgagggtaatgaaatcatcgccacgacgctgtactggctgacgcggacgatccttcaggttgacgtaaccgtaaccgaaacgaccacggtcgcagaggaagtagtggtttaccgtaccgttgtaacggttttcgatacgacgcagttcgccgtaacgttcaccggggctgatgttacagccgatggaacattgctggcagatgctcggcgcaaactgcatatcccatttacggttgtaacgctcggagtgcgttttgtcggtaaatacgccggtcgggcaaatttcgaccaggttaccggaaaattcgctttccagcgtgccgtcttccgggcgaccgaagtagacgttgtcgtgcgcaccgtaaacgcccagatctgtaccgtcagcgtaatctttgtagtaacgcacacagcggtagcaggcgatgcagcggttcatttcgtgagagatgaatggccccaaatcctgattacggtgggtacgtttggtgaaacggtagcgacggaagctgtgtccggtcatcacagtcatatcctgaagatggcagttaccgccctcttcacataccggacagtcgtgcgggtggttggtcatcaaccactcgaccacgctttcacggaactgtttcgcttcttcgtcgtcaatggaaataaaggtgccatcggaagccggtgtcatacaggacatcaccaggcgaccacgcgtgtcttccgcgttttggtattgcttcaccgcacactggcggcaagcaccgacacttcccagcgccggatgccagcaaaagtaaggaatatcaaggcccagagacagacaagcttccagcaggttgtccgctccgttgacctcgtattctttgccgtctacatgaattgtagccattagcatgcttccagttttctcagtcagagactgagcgttaatcgaaattcggttaccagcgctctttcagcaggttcggctgaatcccattaatcaaatgggtattgctgaacggctgtttgattcccgcctcaaattcttcgcggaaatatttgatggcgctctgtaacggctccactgcaccaggtgcgtgggcacagaaagttttacccgggcctaagaatcgacacagttgctcaagtgtttcgatatcgcccggctgaccttcaccacgctccagcgcacgcagaattttcacgctccacggcagaccgtcgcggcacggcgtacaccagccgcaggactcacgggcgaaaaactcttccaggttacgcaccaggctcaccatgttgatctcatggtcaaccgccatcgccagcgccgtacccagacggctgcccgctttaccgatactttcgaattccatcggcagatcaaggtgcgcttcggtcaggaagtcagtccccgcgccgcctggctgccaggctttaaatttcagaccatcacgcataccaccggcgtaatcttcgaggatctcgcgtgcggtggtgccgaacggcagttcccacagtcccggatttttcacccgaccggagaagcccatcagcttggtgccagcatctttacttttgctgatgttctgataccactccacgccgttagcgaggatcgccggaacgttacacagggtttcgacgttgttgacacaggtcggtttaccccatgcgccggaggttgccgggaagggtggcttgctgcgtgggttagcacgacgtccttccagggagttgattaacgctgtttcttccccgcagatgtagcgccctgccccggtatggacgaacagttcgaaatcgaaacctgttcccataatgtttttgccaagcagacccgcttcggtggcttcggcaatggcacggcgcagattaactgccgcttcgatatattcgccacgcaggaagatgtagccacggtaagctttcagcgcaaacgcggagatgagcataccttccaccagcaggtgcggcagttgctccatcaacaggcggtctttataggtgcccggctccatttcatcggcattacacagcaggtaacggatgttcatggattcgtctttcggcatcaggctccatttcaggccagtgctgaagcccgcgccgccgcgccctttcagaccagcgtcttttacctgattaacgatttcgtccggagacagcccggtcagcgccttacgcgcgccttcgtaaccgtttttgctgcggtattcgtccagccacactggctgtttgtcatcgcgcagacgccaggtcagcggatgcgtttcgggagtacggataatgtttttcatttataccgctccagcagttcagggatcgcttccggggtcagatgcgcgtgagtgtcctcatcgatcatcatgtttggccctttatcacagttccccaggcagcaagttggcagcagcgtaaagcggccatcaaatgtcgtttgccctggtttgatgttcagctttttctcgagcgccgcctgaataccctgataaccgttgatatgacagaccacgctgtcacaataacggatcacatggcgaccaaccggctggcggaagatctgactgtagaacgttgccacaccttcgacgtcgcttgccggaatacccagcacatcggcgatcgcgtggatcgcaccatccggcacccagccacgctgcttctgaacgattttcagcgcttcaatggacgccgcacgcgggtcttcgtagtggtgcatctcgtgctcgatcgcttcacgctctgccgcactcagctcaaaagcctcggtttgtggttgttgattctcgtgcataattagcggtccacatcactcataacaaaatcgatactgcccagataaacaatcaggtcagacaccaggctgccgcggatcgccgccggaatttgctgcaaatgcgcaaagctcggggtacgaacacgggtgcggtaactcatggtgctgccgtcgctggtcaggtagtaactgttgatccctttggtcgcctcaatcatctggaaagattcattggcaggcatcaccggaccccagctcacttgcaggaagtgggtgatcagggtttcgatatgttgcagcgtgcgctctttcggcggcggcgtggtcagcgggtgatccgctttgaacgggccttccggcatgttgttgaggcactgctcaagaatgcgcagactctggcgcagctcttccactttaagcattacgcgggtgtagcagtcagaaacgccaccacccaccgggatttcaaagtcgaagttttcatagccagaataaggacgcgccttacgcacgtcgaagtcgatcccggtagcacgcaggcccgcgccagtggtgccccactccagcgcctctttcgcgccataggcggcaacgccctgggaacgacctttcagaatggtgttttgcagcgccgctttctcgtaagacgccagacgtttcggcatccagtcgaggaactcacgcagcaggcgatcccagccgcgcggcaggtcgtgcgctacgccgccaatacggaaccacgccgggtgcatacggaaaccagtgattgcttccaccagatcgtaaattttctgacgatcggtaaaggcgaagaacactggcgtcattgcgccgacgtcctgaataaaggtgctgatatacagcaggtgactgttgatgcggaacagttcggagagcataacgcgaatgacgttaacgcgatccggcacggtgatcccggccagtttctctaccgccagcacgtaaggcatttcgttaacgcagccgccgaggtattcgatacggtcagtatacggaatgtagctgtgccaggactggcgttcgcccattttctccgcaccacggtggtggtaaccgatgtctggtacgcagtcgacaatctcttcgccatcgagttgcaaaacgatacggaaagccccgtgcgcgctcgggtggttcggaccgaggttgaggaacatgaagtcctcgttttcggtgccgcgcttcatcccccactcttccggtttgaaggtcagggcttccatctccagatcctgtttggctttggtcagctcaaacgggctgaattcggtagcgcgcgccggataatctttacgcagcgggtgacctttccaggtttgcggcatcatgatgcgtcgcaggttcgggtgaccgtcgaaagtaatgccaaacagatcccaggtttcacgctcataccagttagcgttcgggaacagtttggtgaaggtcggtacgtgcaggtcgttttctgccagcgccaccttcagcatgatgtcgcggttacgatcgatagaaatcagatggtagaaaacggaaaaatccgcggcaggtaacccttcgcggtgtgtgcgcagacgttcgtccatgccgtgtaagtcaaacagcatgacgtaaggtttcggcagtttctttaagaaatcgccaacttccagtaattgttcacgcttgatccacacaacgggaaccccggtgcgagtcgcctgaacagtaaaggcatccggcccaaaacggttgcgcagttcgccaatcaccggatcatcaagatgatcgcgggtctgccaggcgggttcttgcgcggttaagtcggtcatattgttcaccattgcaaatggtccgtggtgactgtcggcgcagtaagcttcgcgaaatagatttaggaataagcgaagaaaaatccctttgccgacaggcgcaaattaaatctcgtcaggtgtacgcaggttagttacggcaatgcgttcaccgcgcttgcgttcgcgctcactttgcatattggcgcgataaacgccctgatcgccaaccacccaggagagcggacgacgttctttgccgatagattcctgcaacagcatcagtgcctgcatgtacgcttcaggacgcggcgggcagcccgggatatacacatcaaccgggatgaatttatcgacgccctgcacaacggaataaatatcgtacataccaccagagttggcacaggcacccatactgataacccattttggttccagcatctggtcatacagacgctgaataaccggtgccattttggtaaagcaggttcctgcaaccaccatcaggtcagcctgacgcgggctagcacgcaatacttctgcgccaaaacgcgccacgtcatgcaccgcggtaaagctagtcaccatctcaacgtaacagcaggaaagaccgaagttatacggccaaatactgtttttacgaccccagttaaccatgtcattgagcttgcccataaacacgtttttgttaacttcttgctccagagggtcggttacgatctcctgcttttgcagggggtaacggtcgttctcaccgttgggatctatgcgggtgagcgtataatccatcttaatgcctcgcggttagcgttgacgattagcgatactgttcgtttccgggttcatacgctcgcggcgactacgcgcgggcgtccagtccagcgcgccaatacgcaccagataaaccagacctgccagtaacacaaaaataaaaattgcagcttccacaaagcctacccagccgctttcgcggatagaggtactccatgcgaacagatacagcgcttcaacgtcgaagataacgaagaacatggccaccagataaaacttggcggacaggcgtaagcgggcggagccgacgctgtcgataccggattcaaacggcacgtttttgctcctcgcgcgtgcgcgaccgcctaaaaaccaaccgcctaccagcatcaggcaacacaggccaatggcaacgataagaaagatagcgaatgcccagtgatgagcgatgacttcagtggatgtactcatactcattgcttactcatcaaaagtagcgccagattcactgctcttcacggcagatggacgccacatcgattcatggggaggaataaaaaaaaccttacaatcactgtagaaattcttttatacagctaattgatgtggttttttactcctttctataaccttttgtcaactttaacaaaagtttcttcacattagtttacataatatcaacaccattagcatttaatgccctttcaccccagatccttgacgactccaggataattagatgttgttgaatcgtgtccgttgtgaagcaatggaaaaaatacgggtctattttgacaggaatttgtgtcgattcctccccccaaaagagagtattttcttgatctgtgacacgcttttgtcattccataacaaaaacgcagcaacaaatttacgtattttttaacatcattgtagcaggtgatttttttcaggcgattatttgtgcgttcgggacgtgaatctctggtggttgaaaaatgaacagttttgtacgttctgcactatgcgatgaaggatttttactaaaaaaaagccgctggggtttaaaacacccccagcggctcgttttttacactattgtctcaggaattatctatcgtccgtcgattactcgatatccctttcaatcaacaaactatcatccccttccggagcagacattgggctgtattgccacggattatggtagctctccatcgcctgatagatcacctgggccagctcattattactggacggatcatagcacagcaaatattcggtatcaggtagcggcggtaagccatctactccactcagcacacgcaggtccgggctcatcatctcaaccggccttgccgtcacgccaagaccggctttcactgccgcacgaacggccggaagcgtgctggcgacataagccagtcgccatggaatatctgctttattaagcgtcgccagcaccatatcgcgaaacgggctaggatcatccagcaatacaagagggatcggctcgcctttttgcaatatgtattccgctgcgcagtaccagtgtgttgggctggtacgcaggttcaatgccttaaacgcactaggacgatgggtggttaccatcaaatccacttcctgggattccagcatttctgccatataggcattacgtttaacgcggacatccagcgctaatttcggataaacgctactcacgcgatttaacaggaaaggtaagatcgtatcggcagattcatcactagcaccgatagttaatacgccctgaagattactgaacattaaactactgcaggcctcatcattaaaacgcaggattttcctggcgtaaccaagaagttgaatgccatgttcagttaacagtttgttgcgaccgtgacgagcgaacagttctttcccaacgagttgttccagacgctgcatttgctgacttacggcggactgagtacgacacacagcggcagctgcggcagcaaaagtgttcagatcggcaacagcaacaaatgttctcagcagatcgaggtcgaggttaattatcggacgatttgcacttatcatatattatcacttactggcggctcatactgagctggttaatgctgtgcacacacaaacaagcaattccatttgtaatgtgcctccctggcagtttcatccggaacccggacgaaagtaaaaatgcatatgagttgcactaaaaaagcgactcacattgttccgttataatgcctgaagtagatcacagaatatatcttcagggatcgcatatctattaagttactcactcttttctatttatgacatgcgcgtgtttgtataaatgtaaatgtgagtccttgttccactctcgtgcagcatcgctggtcatacgcgaacacgtaccaacagcaatggtgaggcggcatcaagagcagggatccgtcatttatccgagcattttaccccaaaaaccttttatttataagggtcattgcgaattatctgatgcaaagttatgttatgttaggcaaagtaatcttctattattaataagcacatcaaaacctttttgaatattaaataataattaattagcatcatcctcattcattaattccgcttaacaatagtttcacaccttgcccccattgcgacacctcggaaatcatcacgcagttaaactctccgtaatgaggaaatatcatcatcgcgtttcattagtgaattcttaaatgaggcattttcacacaattatcttacagataaaaaaaccagacttacaattaagaatcagaacaattcactatataacattgcatgtaaagcatatacacctcattattttgtcattattaagttattaacagcacaatcgagccttcccctctggcaaaatcttattctgcagaccttcaaaacaccgtcctgggggagtacattgttctaagctgacttccacggcagggagtggcgataacagcaaaaaaggtcaagattcatgtcccccattgaaaaatccagcaaattagagaatgtctgttatgacatccgtggtccggtgctgaaagaagcaaaacgcctggaagaagaaggtaacaaggtactgaaactgaacatcggcaacccagccccgttcggttttgacgcgccagatgaaatcctcgttgacgtgatacgcaacctgcctaccgctcaagggtattgcgattccaaaggtctttactccgcgcgtaaagccatcatgcagcactaccaggctcgtggcatgcgtgatgttaccgtggaagatatttacatcggcaatggtgtaagcgagcttatcgttcaggcaatgcaggcattgctgaacagcggggacgaaatgttggttcctgcaccagattacccactctggaccgcggcggttagcctttccagcggtaaagcggtgcattatctttgcgatgaatcctctgactggttcccggacctcgatgatattcgcgctaaaattacgcctcgtacgcgtgggatcgttattatcaacccaaataacccaaccggcgcggtatattccaaagagcttttaatggagattgtggagattgcacgtcagcataatctcattatcttcgccgatgaaatttatgacaaaattctctacgacgacgctgagcatcacagtattgcgccgctggcacctgacctgctgaccattacctttaacggactgagcaaaacgtaccgcgttgcaggcttccgtcaggggtggatggtgttgaacgggccgaaaaaacacgccaaaggctacatcgaaggtctggaaatgctggctagtatgcgcctgtgtgctaacgttcctgcgcaacacgccattcagaccgcgctaggtggttatcagagcatcagtgaatttattacccctggcggtcgtctttatgagcagcgtaaccgcgcgtgggaactgatcaacgatattccgggcgtttcctgcgtgaaacctcgtggtgcgctgtatatgttcccgaaaatcgacgccaaacgctttaacattcacgacgatcagaaaatggtgttggatttcctgttgcaggaaaaagttctgttggtgcaagggacggcattcaactggccgtggccggatcacttccgcattgtcacgctaccgcgtgtcgatgatatcgagctgtctttgagcaagttcgcgcgtttcctttctggttatcatcagctgtaatcttaatttcactgccggagattgcatccggcagcgttatcccgccacaatgacctgatgatgtcatcatacgtaaggtcactatgaaacagagccatttttttgcccatctctcccgcctgaaactcattaaccgctggccgctcatgcgcaacgtgcggacggaaaatgtgtccgaacacagtttgcaggtagcgatggtcgcccatgcgctggcagctatcaaaaatcgaaaatttggcggtaatgtcaacgccgaacgtatcgctttactggcgatgtaccacgatgccagtgaagtgctcaccggcgatctccctactccggtgaaatacttcaatagccaaatcgctcaggagtacaaggctattgaaaaaatcgctcagcaaaaactggtcgatatggttccggaagagctgcgggatatctttgcgccgttaattgacgagcatgcatatagcgatgaagaaaaaagcctggtgaaacaggcagatgcactgtgtgcatatctgaaatgtctggaagaactcgcggccggaaataatgaattcttgctggcaaaaacgcgactggaagcgacgcttgaagcgcgtcgcagccaggagatggactacttcatggaaatatttgttcccagcttccatcttagcctcgatgagattagccaggatagtccgctgtaagcagccggagtctgcgtcgcatcaggcaataagcgccggatgcgacatcaggctcttgtcaaaacggaaacagcatcgggatcatcaccacacaaaccgccatcacgataatggtgaacggtacccccaacttcacaaagtcactgaagctgtaatttcccggacctaaaaccagtgtgttaacaggactagaaaccggtgtcataaaggcggcggatgctgccatcgccacgaccatcgcgaatggataagggctcacccccatcgttttggcagcagccagcgcaatcggagccatcaacaccgccgtcgcggtattagagataaatagcccaataaccgcgctcaagacaaacaaacaccccagcatcatatgtggcccgtaaccaccgccaatgtccatcagccctttcaccgccagcgcgacacctcccgttttctgtaatgccacagcaaacggcatcatcccaacgatcaaaataatgctcggccagtgaatggatttataggcgctttcagcatctatacagcggaatttccccatcagcaggcaggcgatgatagcggcaacaggattaggaatttcatctgtcagcattaacgccaccattagcaccagacagaaaatggcatggggtgcctggctgtgcgcgggacttgcttcactcacctcttccggtaagttcagcgctacgaagtcgcggccctgtttggccagcataccgatcagtttccagttacccacaaccaggatgatatcgcccagcagcagaggctcatccgccaggctaccttccagcgccacgccattgcgctttagccccaccacattcagtccgtagcgggtacgaaaaccaatttcgcgcacgcttttaccaatcagttcactctcaggaattaaactaatctctgccatgcccacatcaagggcctggtcagaaaaatactcgccgcgcagtaccatcggctccagcaattgctcactacaaaattgccggagatcgacatcagccgcagacatatcaataagcaaaacgtcacgcgcgcgaaattcagaaaccccattaacgttcacgataacgcgacgaaaacgccgccagcgttcaacaccgatgacgttagcgccataacgctcacgtaatttgagatcatccagccgttgaccaatcattgggcttccggggcgaatagccagacgtcgcgcacgcccggtcagtcgatattcacggataagatcgcgaaaggttcgacgcgtccagccttcgcgctgcggggtctgggtatcccctttcagcatgaaacgcatcactaacatatacaaaatacccagcaccagcacgaccaggccaataggtgttacgctaaagaaactgaagccgtgatagccttcacgcagcaattcactgttgactaccaggttcggcggcgtcgccaccagcgtcatcatgccgctaatcagcccggcaaaacttaacggcatcatcagacgactcgggctcgtttgcatacgcatggcaacgcttaacaccacgggaataaagatagcgacaacgccggtactactcataaacgcgccaagccccgcgacggtcagcatcaacaaaaccaacattttgatttcactattgcccgcaactttgaccagccatgttcccattacggtggcaacaccggtacggaccaaaccatcgccaataataaacaaggcggcaatcaggacaacgttaggatcagaaaagccggaaaatacttctgggactgtcagcgttccgcttaatgcaaacgcgacaataacaaacaaagcgaccgcatccatacgcactctgcccgtcgcaaacaagacgatggcaacggccagtaaactaagaacccaaatcaattcaccgttcacaacttatccttgttaattgagggggatgacttgattctgccataaaaaagccccgacgagacggggctaaatcatgatcaggtgtttcactgaataataacatcgccatttggctgtttggtcacagtaatttgctccagactgtggaggaccaaatcgacctcattcaggcgcggggtatctgccggagcgttaaccgcaatgacatgacaacccgccgccaggccagaaagcacgccagcgggagcatcttccaccaccacacactcctgcggcgcaagccccagcagctgcgcgcctaacagatacgcatcaggttctggttttccgcgcttcactcgctcagcggttacaaacacctctggtgcgggaagcccagctattttatggcgcgctcgcgctaccggcatggagccagaagtcacaatggcccacggaatacctgctttattcaaatgactgagtaaggcgattgcccccggaagcgcggtaataccttcggtttccgtggcctcgatgtgctccagacgcgtaaactcggcggcaatatcagcctcggatttgcccgccataaaatggcgcagagaggtgatcgcctgtttaccgtgaatgaaagccagcacctcttccggcgctaacccatgacgtctggcccagttgctccacgcccgttctaccgcaggcagggaatccaccagcgttccatcaagatcaaacagaaaacctttgcaccgcacgcgggcctcctcaggcattgataatttgattaatttcgttggcgctcaaatggtactgacgcgggcaggcatgccacacattaagcatgcgctgatatttttcccacattggcgtctgggcgttaaaaccgtgagttccggcgtcaaaatgggtatagcgcccttccacattaaccataaagcggacataaccgaggtaacgtgcttcagtggcggcgtcaaagccgaggaaggtgacacgacgttcatcgatggattgctggtcctgcaaattagaccaggaaacatgcaacgcatgatacatctccataatgtcgatgatagtgcggcaggtttcttctttcagctcgccaaactcgcgatccaattcacgcatctgtaatccgtaaccacgctcaataattgtttgcaggcgacggtaacgttcagcatttgccggatcgagcatagtcatcatcttgtactgattagacaaaataagacgttgcgcgttggtcatttccattgttgactcctgtatcactctactacggtgaaaaaaaagaaggctgagtatgccttcttttatatgcgtaatcaggggtcaattacaaatcatcaaggaaagttttatccagttgtttgaaggcgcgcttaagcgtgtcagctaatgcctggtaatcaggcttgccttcaacgggtgccaacacctgtccagactcctgcaatttaccgcgaacttcataaaaccagttaaggattgcagggggtaatggcgtgacagaacgcttgcccagccaccacaatccctgcatgggtaaacttaaggcgaacagggcagtggcaactgccggcccaagctgaccgcccagggcaatctgccagcagagagtaaatacggcgatcggcggcataaaacggatcgcataacgcgtcatcttgataacgcgattttcgacaaagaccggggcaaggcgtttttccagcggccacgtcttactgtaatgctgtccccggcgaaacaagctaaaaaaattaacagaacgattatccggcgtactcatgcttcacctcaacttcacatataaagattcaaaaatttgtgcaaattcacaactcagcgggacaacgttcaaaacattttgtcttccatacccactatcaggtatcctttagcagcctgaaggcctaagtagtacatattcattgagtcgtcaaattcatatacattatgccattggctgaaaattacgcaaaatggcatagactcaagatatttcttccatcatgcaaaaaaaatttgcagtgcatgatgttaatcataaatgtcggtgtcatcatgcgctacgctctatggctccctgacgtttttttagccacgtatcaattataggtacttccatgagcagtaagttagtactggttctgaactgcggtagttctagtctgaaatttgccatcatcgatgcagtaaatggtgaagagtacctttctggtttagccgaatgtttccacctgcccgaagcacgtatcaaatggaaaatggacggcaataaacaggaagcggctttaggtgcaggcgccgctcacagcgaagcgctcaactttatcgttaatactattctggcacaaaaaccagaactgtctgcgcagctgactgctatcggtcaccgtatcgtacacggcggcgaaaagtataccagctccgtagtgatcgatgagtctgttattcagggtatcaaagatgcagcttcttttgcaccgctgcacaacccggctcacctgatcggtatcgaagaagctctgaaatctttcccacagctgaaagacaaaaacgttgctgtatttgacaccgcgttccaccagactatgccggaagagtcttacctctacgccctgccttacaacctgtacaaagagcacggcatccgtcgttacggcgcgcacggcaccagccacttctatgtaacccaggaagcggcaaaaatgctgaacaaaccggtagaagaactgaacatcatcacctgccacctgggcaacggtggttccgtttctgctatccgcaacggtaaatgcgttgacacctctatgggcctgaccccgctggaaggtctggtcatgggtacccgttctggtgatatcgatccggcgatcatcttccacctgcacgacaccctgggcatgagcgttgacgcaatcaacaaactgctgaccaaagagtctggcctgctgggtctgaccgaagtgaccagcgactgccgctatgttgaagacaactacgcgacgaaagaagacgcgaagcgcgcaatggacgtttactgccaccgcctggcgaaatacatcggtgcctacactgcgctgatggatggtcgtctggacgctgttgtattcactggtggtatcggtgaaaatgccgcaatggttcgtgaactgtctctgggcaaactgggcgtgctgggctttgaagttgatcatgaacgcaacctggctgcacgtttcggcaaatctggtttcatcaacaaagaaggtacccgtcctgcggtggttatcccaaccaacgaagaactggttatcgcgcaagacgcgagccgcctgactgcctgatttcacaccgccagctcagctggcggtgctgttttgtaacccgccaaatcggcggtaacgaaagaggataaaccgtgtcccgtattattatgctgatccctaccggaaccagcgtcggtctgaccagcgtcagccttggcgtgatccgtgcaatggaacgcaaaggcgttcgtctgagcgttttcaaacctatcgctcagccgcgtaccggtggcgatgcgcccgatcagactacgactatcgtgcgtgcgaactcttccaccacgacggccgctgaaccgctgaaaatgagctacgttgaaggtctgctttccagcaatcagaaagatgtgctgatggaagagatcgtcgcaaactaccacgctaacaccaaagacgctgaagtcgttctggttgaaggtctggtcccgacacgtaagcaccagtttgcccagtctctgaactacgaaatcgctaaaacgctgaatgcggaaatcgtcttcgttatgtctcagggcactgacaccccggaacagctgaaagagcgtatcgaactgacccgcaacagcttcggcggtgccaaaaacaccaacatcaccggcgttatcgttaacaaactgaacgcaccggttgatgaacagggtcgtactcgcccggatctgtccgagattttcgacgactcttccaaagctaaagtaaacaatgttgatccggcgaagctgcaagaatccagcccgctgccggttctcggcgctgtgccgtggagctttgacctgatcgcgactcgtgcgatcgatatggctcgccacctgaatgcgaccatcatcaacgaaggcgacatcaatactcgccgcgttaaatccgtcactttctgcgcacgcagcattccgcacatgctggagcacttccgtgccggttctctgctggtgacttccgcagaccgtcctgacgtgctggtggccgcttgcctggcagccatgaacggcgtagaaatcggtgccctgctgctgactggcggttacgaaatggacgcgcgcatttctaaactgtgcgaacgtgctttcgctaccggcctgccggtatttatggtgaacaccaacacctggcagacctctctgagcctgcagagcttcaacctggaagttccggttgacgatcacgaacgtatcgagaaagttcaggaatacgttgctaactacatcaacgctgactggatcgaatctctgactgccacttctgagcgcagccgtcgtctgtctccgcctgcgttccgttatcagctgactgaacttgcgcgcaaagcgggcaaacgtatcgtactgccggaaggtgacgaaccgcgtaccgttaaagcagccgctatctgtgctgaacgtggtatcgcaacttgcgtactgctgggtaatccggcagagatcaaccgtgttgcagcgtctcagggtgtagaactgggtgcagggattgaaatcgttgatccagaagtggttcgcgaaagctatgttggtcgtctggtcgaactgcgtaagaacaaaggcatgaccgaaaccgttgcccgcgaacagctggaagacaacgtggtgctcggtacgctgatgctggaacaggatgaagttgatggtctggtttccggtgctgttcacactaccgcaaacaccatccgtccgccgctgcagctgatcaaaactgcaccgggcagctccctggtatcttccgtgttcttcatgctgctgccggaacaggtttacgtttacggtgactgtgcgatcaacccggatccgaccgctgaacagctggcagaaatcgcgattcagtccgctgattccgctgcggccttcggtatcgaaccgcgcgttgctatgctctcctactccaccggtacttctggtgcaggtagcgacgtagaaaaagttcgcgaagcaactcgtctggcgcaggaaaaacgtcctgacctgatgatcgacggtccgctgcagtacgacgctgcggtaatggctgacgttgcgaaatccaaagcgccgaactctccggttgcaggtcgcgctaccgtgttcatcttcccggatctgaacaccggtaacaccacctacaaagcggtacagcgttctgccgacctgatctccatcgggccgatgctgcagggtatgcgcaagccggttaacgacctgtcccgtggcgcactggttgacgatatcgtctacaccatcgcgctgactgcgattcagtctgcacagcagcagtaatctcgtcatcatccgcagctttgcgctgcggatatctgaaccggaaataatcactatttccggttttttattctcttaatttgcattaatcctttctgattatcttgcttaactgcgctgcatcaatgaattgcgccatcccactttgcatacttaccactttgttttgtgcaagggaatatttgcgctatgtccgcaatcactgaatccaaaccaacaagaagatgggcaatgcccgatacgttggtgattatcttttttgttgctattttaaccagccttgccacctgggtagttccggtggggatgtttgacagtcaggaagtgcagtatcaggttgatggtcaaacaaaaacacgcaaagtcgtagatccacacagttttcgcattctgactaacgaagcaggcgaacctgagtatcaccgcgtacagctgttcacgacgggcgatgaacgcccgggcctgatgaacttcccgtttgaaggattaaccagtggaagcaaatacgggacagccgttggcatcatcatgtttatgctggtgattggcggcgcgtttggcattgtgatgcgtacaggaaccattgataacggtatcctggcgcttattcgccatacccgcgggaatgaaattctctttattcctgcgctgtttattctgtttagtcttggcggcgcggtatttggtatgg

(The sequence listing continues in the following parts.)
